(19) United States
(12) Patent Application Publication
(10) Pub. No.: US 2025/0282848 A1
(43) Pub. Date: Sep. 11, 2025

(54) NON-VIRAL DNA VECTORS AND USES THEREOF FOR EXPRESSING FVIII THERAPEUTICS

(71) Applicant: Generation Bio Co., Cambridge, MA (US)

(72) Inventors: Douglas Anthony Kerr, Cambridge, MA (US); Debra Klatte, Cambridge, MA (US); Phillip Samayoa, Cambridge, MA (US); Nathaniel Silver, Cambridge, MA (US)

(21) Appl. No.: 19/214,171

(22) Filed: May 21, 2025

Related U.S. Application Data
(63) Continuation of application No. 17/437,123, filed on Sep. 8, 2021, now Pat. No. 12,338,275.
(60) Provisional application No. 62/817,904, filed on Mar. 13, 2019.
(60) Provisional application No. 62/856,432, filed on Jun. 3, 2019.

(51) Int. Cl. C07K 14/755; A61K 38/00; A61K 48/00; C12N 15/85

(52) U.S. Cl. CPC C07K 14/755; A61K 48/005; A61K 48/0075; C12N 15/85; A61K 38/00; C12N 2750/14143; C12N 2820/60

(57) ABSTRACT

The application describes ceDNA vectors having linear and continuous structure for delivery and expression of a transgene. ceDNA vectors comprise an expression cassette flanked by two ITR sequences, where the expression cassette encodes a transgene encoding FVIII protein. Some ceDNA vectors further comprise cis-regulatory elements, including regulatory switches. Further provided herein are methods and cell lines for reliable gene expression of FVIII protein in vitro, ex vivo and in vivo using the ceDNA vectors. Provided herein are method and compositions comprising ceDNA vectors useful for the expression of FVIII protein in a cell, tissue or subject, and methods of treatment of diseases with said ceDNA vectors expressing FVIII protein. Such FVIII protein can be expressed for treating disease, e.g., hemophilia A.

### RELATED APPLICATIONS

[0001] This application claims priority to U.S. Provisional Application No. 62/817,904, filed on Mar. 13, 2019 and U.S. Provisional Application No. 62/856,432, filed on Jun. 3, 2019, the contents of each of which are hereby incorporated by reference in their entireties.

### SEQUENCE LISTING

[0002] The instant application contains a Sequence Listing, which has been submitted electronically in ASCII format, as well as sequences in Tables 1-9 herein, and each are hereby incorporated by reference in its entirety. Said ASCII copy, created on Mar. 11, 2020, is named 131698-06020_SL.txt and is 116,781 bytes in size

### TECHNICAL FIELD

[0003] The present invention relates to the field of gene therapy, including non-viral vectors for expressing a transgene or isolated polynucleotides in a subject or cell. The disclosure also relates to nucleic acid constructs, promoters, vectors, and host cells including the polynucleotides as well as methods of delivering exogenous DNA sequences to a target cell, tissue, organ or organism. For example, the present disclosure provides methods for using non-viral ceDNA vectors to express FVIII, from a cell, e.g., expressing the FVIII therapeutic protein for the treatment of a subject with a hemophilia A. The methods and compositions can be used e.g., for treating disease by expressing the FVIII in a cell or tissue of a subject in need thereof.

### BACKGROUND

[0004] Gene therapy aims to improve clinical outcomes for patients suffering from either genetic mutations or acquired diseases caused by an aberration in the gene expression profile. Gene therapy includes the treatment or prevention of medical conditions resulting from defective genes or abnormal regulation or expression, e.g. underexpression or overexpression, that can result in a disorder, disease, malignancy, etc. For example, a disease or disorder caused by a defective gene might be treated, prevented or ameliorated by delivery of a corrective genetic material to a patient, or might be treated, prevented or ameliorated by altering or silencing a defective gene, e.g., with a corrective genetic material to a patient resulting in the therapeutic expression of the genetic material within the patient.

[0005] The basis of gene therapy is to supply a transcription cassette with an active gene product (sometimes referred to as a transgene), e.g., that can result in a positive gain-of-function effect, a negative loss-of-function effect, or another outcome. Such outcomes can be attributed to expression of a therapeutic protein such as an antibody, a functional enzyme, or a fusion protein. Gene therapy can also be used to treat a disease or malignancy caused by other factors. Human monogenic disorders can be treated by the delivery and expression of a normal gene to the target cells. Delivery and expression of a corrective gene in the patient's target cells can be carried out via numerous methods, including the use of engineered viruses and viral gene delivery vectors. Among the many virus-derived vectors available (e.g., recombinant retrovirus, recombinant lentivirus, recombinant adenovirus, and the like), recombinant adeno-associated virus (rAAV) is gaining popularity as a versatile vector in gene therapy.

[0006] Adeno-associated viruses (AAV) belong to the Parvoviridae family and more specifically constitute the dependoparvovirus genus. Vectors derived from AAV (i.e., recombinant AAV (rAVV) or AAV vectors) are attractive for delivering genetic material because (i) they are able to infect (transduce) a wide variety of non-dividing and dividing cell types including myocytes and neurons; (ii) they are devoid of the virus structural genes, thereby diminishing the host cell responses to virus infection, e.g., interferon-mediated responses; (iii) wild-type viruses are considered non-pathologic in humans; (iv) in contrast to wild type AAV, which are capable of integrating into the host cell genome, replication-deficient AAV vectors lack the rep gene and generally persist as episomes, thus limiting the risk of insertional mutagenesis or genotoxicity; and (v) in comparison to other vector systems, AAV vectors are generally considered to be relatively poor immunogens and therefore do not trigger a significant immune response (see ii), thus gaining persistence of the vector DNA and potentially, long-term expression of the therapeutic transgenes.

[0007] However, there are several major deficiencies in using AAV particles as a gene delivery vector. One major drawback associated with rAAV is its limited viral packaging capacity of about 4.5 kb of heterologous DNA (Dong et al., 1996; Athanasopoulos et al., 2004; Lai et al., 2010), and as a result, use of AAV vectors has been limited to less than 150,000 Da protein coding capacity. The second drawback is that as a result of the prevalence of wild-type AAV infection in the population, candidates for rAAV gene therapy have to be screened for the presence of neutralizing antibodies that eliminate the vector from the patient. A third drawback is related to the capsid immunogenicity that prevents re-administration to patients that were not excluded from an initial treatment. The immune system in the patient can respond to the vector which effectively acts as a “booster” shot to stimulate the immune system generating high titer anti-AAV antibodies that preclude future treatments. Some recent reports indicate concerns with immunogenicity in high dose situations. Another notable drawback is that the onset of AAV-mediated gene expression is relatively slow, given that single-stranded AAV DNA must be converted to double-stranded DNA prior to heterologous gene expression.

[0008] Additionally, conventional AAV virions with capsids are produced by introducing a plasmid or plasmids containing the AAV genome, rep genes, and cap genes (Grimm et al., 1998). However, such encapsidated AAV virus vectors were found to inefficiently transduce certain cell and tissue types and the capsids also induce an immune response.

[0009] Accordingly, use of adeno-associated virus (AAV) vectors for gene therapy is limited due to the single administration to patients (owing to the patient immune response), the limited range of transgene genetic material suitable for delivery in AAV vectors due to minimal viral packaging capacity (about 4.5 kb), and slow AAV-mediated gene expression.

[0010] There is large unmet need for disease-modifying therapies in hemophilia A. Current therapies are burdensome and require intravenous (IV) administrations. First, these Factor VIII injectables do not provide continuous delivery of factors, with trough levels allowing bleeding episodes. Second, there are no approved gene therapies for hemophilia A, and AAV based therapies cannot be used by 25% to 40% of patients due to pre-existing antibodies. AAV can only be administered once, and the resulting Factor VIII levels might not be high enough to be efficacious, or may be supranormal, dose levels cannot be titrated. Third, many hemophilia A patients cannot utilize these therapies because of the development of neutralizing antibodies to these exogenous, artificial clotting factors.

[0011] Accordingly, there is need in the field for a technology that permits expression of a therapeutic FVIII protein in a cell, tissue or subject for the treatment of hemophilia A.

### BRIEF DESCRIPTION

[0012] The technology described herein relates to methods and compositions for treatment of Hemophilia A by expression of Factor VIII (FVIII) protein from a capsid-free (e.g., non-viral) DNA vector with covalently-closed ends (referred to herein as a “closed-ended DNA vector” or a “ceDNA vector”), where the ceDNA vector comprises a FVIII nucleic acid sequence or codon optimized versions thereof. These ceDNA vector can be used to produce FVIII proteins for treatment, monitoring, and diagnosis. The application of ceDNA vectors expressing FVIII to the subject for the treatment of hemophilia A is useful to: (i) provide disease modifying levels of FVIII enzyme, (ii) be minimally invasive in delivery, (iii) be repeatable and dosed-to-effect, (iv) have rapid onset of therapeutic effect, (v) result in sustained expression of corrective FVIII enzyme in the liver, (vi) restore urea cycle function, and/or (vii) be titratable to achieve the appropriate pharmacologic levels of the defective enzyme.

[0013] In some embodiments, a ceDNA-vector expressing FVIII is optionally present in a liposome nanoparticle formulation (LNP) to the treatment of hemophilia A. The ceDNA vectors described herein can provide one or more benefits including, but not limited to providing disease modifying levels of Factor VIII, being minimally invasive in delivery, being repeatable and dosed-to-effect, providing a rapid onset of therapeutic effect, within days of therapeutic intervention, sustained expression of corrective Factor VIII levels in the circulation, be titratable to achieve the appropriate pharmacologic levels of the defective coagulation factor, and/or provide treatments for other hemophilia, including but not limited to Factor VIII deficiency.

[0014] Accordingly, the invention described herein relates to a capsid-free (e.g., non-viral) DNA vector with covalently-closed ends (referred to herein as a “closed-ended DNA vector” or a “ceDNA vector”) comprising a heterogeneous gene encoding FVIII, to permit expression of the FVIII therapeutic protein in a cell. According to one aspect, the disclosure provides a capsid-free close-ended DNA (ceDNA) vector comprising at least one heterologous nucleotide sequence between flanking inverted terminal repeats (ITRs), wherein at least one heterologous nucleotide sequence encodes at least one FVIII protein, wherein the least one heterologous nucleotide sequence that encodes at least one FVIII protein is selected from any of the sequences in Table 1. According to some embodiments, the ceDNA vector comprises a nucleic acid sequence selected from any of those in Table 9. According to some embodiments, the ceDNA vector comprises a nucleic acid sequence selected from the group consisting of SEQ ID NO: 207, SEQ ID NO: 210, SEQ ID NO: 212, SEQ ID NO: 199, SEQ ID NO: 208, SEQ ID NO: 211 and SEQ ID NO: 214. According to some embodiments, the ceDNA vector comprises a nucleic acid sequence that is at least 85% identical to SEQ ID NO: 210. According to some embodiments, the ceDNA vector comprises a nucleic acid sequence that is at least 90% identical to SEQ ID NO: 210. According to some embodiments, the ceDNA vector comprises a nucleic acid sequence that is at least 95% identical to SEQ ID NO: 210. According to some embodiments, the ceDNA vector comprises a nucleic acid sequence that is at least 96% identical to SEQ ID NO: 210. According to some embodiments, the ceDNA vector comprises a nucleic acid sequence that is at least 97% identical to SEQ ID NO: 210. According to some embodiments, the ceDNA vector comprises a nucleic acid sequence that is at least 98% identical to SEQ ID NO: 210. According to some embodiments, the ceDNA vector comprises a nucleic acid sequence that is at least 99% identical to SEQ ID NO: 210. According to some embodiments, the ceDNA vector comprises a nucleic acid sequence that is at least 85% identical to SEQ ID NO: 214. According to some embodiments, the ceDNA vector comprises a nucleic acid sequence that is at least 90% identical to SEQ ID NO: 214. According to some embodiments, the ceDNA vector comprises a nucleic acid sequence that is at least 95% identical to SEQ ID NO: 214. According to some embodiments, the ceDNA vector comprises a nucleic acid sequence that is at least 96% identical to SEQ ID NO: 214. According to some embodiments, the ceDNA vector comprises a nucleic acid sequence that is at least 97% identical to SEQ ID NO: 214. According to some embodiments, the ceDNA vector comprises a nucleic acid sequence that is at least 98% identical to SEQ ID NO: 214. According to some embodiments, the ceDNA vector comprises a nucleic acid sequence that is at least 99% identical to SEQ ID NO: 214.

[0015] In one embodiment, disclosed herein is a capsid-free close-ended DNA (ceDNA) vector comprising at least one heterologous nucleotide sequence between flanking inverted terminal repeats (ITRs), wherein at least one heterologous nucleotide sequence encodes at least one FVIII protein, wherein the least one heterologous nucleotide sequence that encodes at least one FVIII protein is selected from a sequence having at least 85% identity to any sequence in Table 1. In one embodiment, the least one heterologous nucleotide sequence that encodes at least one FVIII protein is selected from a sequence having at least 90% identity to any sequence in Table 1. In one embodiment, the least one heterologous nucleotide sequence that encodes at least one FVIII protein is selected from a sequence having at least 910% identity to any sequence in Table 1. In one embodiment, the least one heterologous nucleotide sequence that encodes at least one FVIII protein is selected from a sequence having at least 92% identity to any sequence in Table 1. In one embodiment, the least one heterologous nucleotide sequence that encodes at least one FVIII protein is selected from a sequence having at least 93% identity to any sequence in Table 1. In one embodiment, the least one heterologous nucleotide sequence that encodes at least one FVIII protein is selected from a sequence having at least 94% identity to any sequence in Table 1. In one embodiment, the least one heterologous nucleotide sequence that encodes at least one FVIII protein is selected from a sequence having at least 95% identity to any sequence in Table 1. In one embodiment, the least one heterologous nucleotide sequence that encodes at least one FVIII protein is selected from a sequence having at least 96% identity to any sequence in Table 1. In one embodiment, the least one heterologous nucleotide sequence that encodes at least one FVIII protein is selected from a sequence having at least 97% identity to any sequence in Table 1. In one embodiment, the least one heterologous nucleotide sequence that encodes at least one FVIII protein is selected from a sequence having at least 98% identity to any sequence in Table 1. In one embodiment, the least one heterologous nucleotide sequence that encodes at least one FVIII protein is selected from a sequence having at least 99% identity to any sequence in Table 1. In one embodiment, the least one heterologous nucleotide sequence that encodes at least one FVIII protein is selected from a sequence comprising any sequence in Table 1. In one embodiment, the least one heterologous nucleotide sequence that encodes at least one FVIII protein is selected from a sequence consisting of any sequence in Table 1.

[0016] In one embodiment, the sequence in Table 1 is selected from the group consisting of SEQ ID NO:380, SEQ ID NO:381, SEQ ID NO:382, SEQ ID NO:383, SEQ ID NO:384, SEQ ID NO:385, SEQ ID NO:386, SEQ ID NO:387, SEQ ID NO:388, SEQ ID NO:389, SEQ ID NO:390, SEQ ID NO:391, SEQ ID NO:392, SEQ ID NO:393, SEQ ID NO:394, SEQ ID NO:395, SEQ ID NO:396, and SEQ ID NO:397. In one embodiment, the sequence is SEQ ID NO: 380. In one embodiment, the sequence is SEQ ID NO:381. In one embodiment, the sequence is SEQ ID NO:382. In one embodiment, the sequence is SEQ ID NO:383. In one embodiment, the sequence is SEQ ID NO:384. In one embodiment, the sequence is SEQ ID NO:385. In one embodiment, the sequence is SEQ ID NO:386. In one embodiment, the sequence is SEQ ID NO:387. In one embodiment, the sequence is SEQ ID NO:388. In one embodiment, the sequence is SEQ ID NO:389. In one embodiment, the sequence is SEQ ID NO:390. In one embodiment, the sequence is SEQ ID NO:391. In one embodiment, the sequence is SEQ ID NO:392. In one embodiment, the sequence is SEQ ID NO:393. In one embodiment, the sequence is SEQ ID NO:394. In one embodiment, the sequence is SEQ ID NO:395. In one embodiment, the sequence is SEQ ID NO:396. In one embodiment, the sequence is SEQ ID NO:397.

[0017] In one embodiment, the ceDNA vector comprises a nucleic acid sequence selected from a sequence having at least 85% identity with any sequence in Table 9. In one embodiment, the ceDNA vector comprises a nucleic acid sequence selected from a sequence having at least 90% identity with any sequence in Table 9. In one embodiment, the ceDNA vector comprises a nucleic acid sequence selected from a sequence having at least 91% identity with any sequence in Table 9. In one embodiment, the ceDNA vector comprises a nucleic acid sequence selected from a sequence having at least 92% identity with any sequence in Table 9. In one embodiment, the ceDNA vector comprises a nucleic acid sequence selected from a sequence having at least 93% identity with any sequence in Table 9. In one embodiment, the ceDNA vector comprises a nucleic acid sequence selected from a sequence having at least 94% identity with any sequence in Table 9. In one embodiment, the ceDNA vector comprises a nucleic acid sequence selected from a sequence having at least 95% identity with any sequence in Table 9. In one embodiment, the ceDNA vector comprises a nucleic acid sequence selected from a sequence having at least 96% identity with any sequence in Table 9. In one embodiment, the ceDNA vector comprises a nucleic acid sequence selected from a sequence having at least 97% identity with any sequence in Table 9. In one embodiment, the ceDNA vector comprises a nucleic acid sequence selected from a sequence having at least 98% identity with any sequence in Table 9. In one embodiment, the ceDNA vector comprises a nucleic acid sequence selected from a sequence having at least 99% identity with any sequence in Table 9. In one embodiment, the ceDNA vector comprises a nucleic acid sequence comprising a sequence in Table 9. In one embodiment, the ceDNA vector comprises a nucleic acid sequence consisting of a sequence in Table 9.

[0018] In one embodiment, the sequence in Table 9 is selected from the group consisting of SEQ ID NO: 197, SEQ ID NO: 198, SEQ ID NO: 199, SEQ ID NO:200, SEQ ID NO:201, SEQ ID NO:202, SEQ ID NO:203, SEQ ID NO:204, SEQ ID NO:205, SEQ ID NO:206, SEQ ID NO:207, SEQ ID NO:208, SEQ ID NO:209, SEQ ID NO:210, SEQ ID NO:211, SEQ ID NO:212, SEQ ID NO:213, SEQ ID NO:214, SEQ ID NO:215, SEQ ID NO:216, and SEQ ID NO:217. In one embodiment, the sequence in Table 9 is SEQ ID NO: 197. In one embodiment, the sequence in Table 9 is SEQ ID NO: 198. In one embodiment, the sequence in Table 9 is SEQ ID NO:199. In one embodiment, the sequence in Table 9 is 200. In one embodiment, the sequence in Table 9 is 201. In one embodiment, the sequence in Table 9 is 202. In one embodiment, the sequence in Table 9 is 203. In one embodiment, the sequence in Table 9 is 204. In one embodiment, the sequence in Table 9 is 205. In one embodiment, the sequence in Table 9 is 206. In one embodiment, the sequence in Table 9 is 207. In one embodiment, the sequence in Table 9 is 208. In one embodiment, the sequence in Table 9 is 209. In one embodiment, the sequence in Table 9 is 210. In one embodiment, the sequence in Table 9 is 211. In one embodiment, the sequence in Table 9 is 212. In one embodiment, the sequence in Table 9 is 213. In one embodiment, the sequence in Table 9 is 214. In one embodiment, the sequence in Table 9 is 215. In one embodiment, the sequence in Table 9 is 216. In one embodiment, the sequence in Table 9 is 217.

[0019] In one embodiment, the ceDNA vector comprises anucleic acid sequence having at least 85% identity to SEQ ID NO:210. In one embodiment, the ceDNA vector comprises anucleic acid sequence having at least 90% identity to SEQ ID NO:210. In one embodiment, the ceDNA vector comprises anucleic acid sequence having at least 91% identity to SEQ ID NO:210. In one embodiment, the ceDNA vector comprises anucleic acid sequence having at least 92% identity to SEQ ID NO:210. In one embodiment, the ceDNA vector comprises anucleic acid sequence having at least 93% identity to SEQ ID NO:210. In one embodiment, the ceDNA vector comprises anucleic acid sequence having at least 94% identity to SEQ ID NO:210. In one embodiment, the ceDNA vector comprises anucleic acid sequence having at least 95% identity to SEQ ID NO:210. In one embodiment, the ceDNA vector comprises anucleic acid sequence having at least 96% identity to SEQ ID NO:210. In one embodiment, the ceDNA vector comprises anucleic acid sequence having at least 97% identity to SEQ ID NO:210. In one embodiment, the ceDNA vector comprises anucleic acid sequence having at least 98% identity to SEQ ID NO:210. In one embodiment, the ceDNA vector comprises anucleic acid sequence having at least 99% identity to SEQ ID NO:210. In one embodiment, the ceDNA vector comprises anucleic acid sequence comprising SEQ ID NO:210. In one embodiment, the ceDNA vector comprises anucleic acid sequence consisting of SEQ ID NO:210.

[0020] In one embodiment, the ceDNA vector comprises anucleic acid sequence having at least 85% identity to SEQ ID NO:214. In one embodiment, the ceDNA vector comprises anucleic acid sequence having at least 90% identity to SEQ ID NO:214. In one embodiment, the ceDNA vector comprises anucleic acid sequence having at least 91% identity to SEQ ID NO:214. In one embodiment, the ceDNA vector comprises anucleic acid sequence having at least 92% identity to SEQ ID NO:214. In one embodiment, the ceDNA vector comprises anucleic acid sequence having at least 93% identity to SEQ ID NO:214. In one embodiment, the ceDNA vector comprises anucleic acid sequence having at least 94% identity to SEQ ID NO:214. In one embodiment, the ceDNA vector comprises anucleic acid sequence having at least 95% identity to SEQ ID NO:214. In one embodiment, the ceDNA vector comprises anucleic acid sequence having at least 96% identity to SEQ ID NO:214. In one embodiment, the ceDNA vector comprises anucleic acid sequence having at least 97% identity to SEQ ID NO:214. In one embodiment, the ceDNA vector comprises anucleic acid sequence having at least 98% identity to SEQ ID NO:214. In one embodiment, the ceDNA vector comprises anucleic acid sequence having at least 99% identity to SEQ ID NO:214. In one embodiment, the ceDNA vector comprises anucleic acid sequence comprising SEQ ID NO:214. In one embodiment, the ceDNA vector comprises anucleic acid sequence consisting of SEQ ID NO:214.

[0021] The ceDNA vectors for expression of FVIII protein production as described herein are capsid-free, linear duplex DNA molecules formed from a continuous strand of complementary DNA with covalently-closed ends (linear, continuous and non-encapsidated structure), which comprise a 5′ inverted terminal repeat (ITR) sequence and a 3′ ITR sequence, where the 5′ ITR and the 3′ ITR can have the same symmetrical three-dimensional organization with respect to each other, (i.e., symmetrical or substantially symmetrical), or alternatively, the 5′ ITR and the 3′ ITR can have different three-dimensional organization with respect to each other (i.e., asymmetrical ITRs). In addition, the ITRs can be from the same or different serotypes. In some embodiments, a ceDNA vector can comprise ITR sequences that have a symmetrical three-dimensional spatial organization such that their structure is the same shape in geometrical space, or have the same A, C-C′ and B-B′ loops in 3D space (i.e., they are the same or are mirror images with respect to each other). In some embodiments, one ITR can be from one AAV serotype, and the other ITR can be from a different AAV serotype.

[0022] Accordingly, some aspects of the technology described herein relate to a ceDNA vector for improved protein expression and/or production of the above described FVIII protein that comprise ITR sequences that flank a heterologous nucleic acid sequence comprising any FVIII nucleic acid sequence disclosed in Tables 5, the ITR sequences being selected from any of: (i) at least one WT ITR and at least one modified AAV inverted terminal repeat (ITR) (e.g., asymmetric modified ITRs); (ii) two modified ITRs where the mod-ITR pair have a different three-dimensional spatial organization with respect to each other (e.g., asymmetric modified ITRs), or (iii) symmetrical or substantially symmetrical WT-WT ITR pair, where each WT-ITR has the same three-dimensional spatial organization, or (iv) symmetrical or substantially symmetrical modified ITR pair, where each mod-ITR has the same three-dimensional spatial organization. The ceDNA vectors disclosed herein can be produced in eukaryotic cells, thus devoid of prokaryotic DNA modifications and bacterial endotoxin contamination in insect cells.

[0023] The methods and compositions described herein relate, in part, to the discovery of a non-viral capsid-free DNA vector with covalently-closed ends (ceDNA vectors) that can be used to express at least one FVIII protein, or more than one FVIII protein from a cell, including but not limited to cells of the liver.

[0024] Accordingly, provided herein in one aspect are DNA vectors (e.g., ceDNA vectors) comprising at least one heterologous nucleic acid sequence encoding at least one transgene encoding FVIII proteins thereof operably linked to a promoter positioned between two different AAV inverted terminal repeat sequences (ITRs), one of the ITRS comprising a functional AAV terminal resolution site and a Rep binding site, and one of the ITRs comprising a deletion, insertion, or substitution relative to the other ITR; wherein the transgene encodes an FVIII protein; and wherein the DNA when digested with a restriction enzyme having a single recognition site on the DNA vector has the presence of characteristic bands of linear and continuous DNA as compared to linear and non-continuous DNA controls when analyzed on a non-denaturing gel. Other aspects include delivery of the FVIII protein by expressing it in vivo from a ceDNA vector as described herein and further, the treatment of hemophilia A using ceDNA vectors encoding the FVIII. Also contemplated herein are cells comprising a ceDNA vector encoding FVIII as described herein. According to some embodiments, the ceDNA vector is selected from the group consisting of ceDNAFVIII-vector 16, ceDNAFVIII-vector 19, ceDNAFVIII-vector 21, ceDNAFVIII-vector 8, ceDNAFVIII-vector 17, ceDNAFVIII-vector 20 and ceDNAFVIII-vector 23. According to some embodiments, the ceDNA vector is ceDNAFVIII vector 19 or ceDNAFVIII vector 23.

[0025] Aspects of the invention relate to methods to produce the ceDNA vectors useful for FVIII protein expression in a cell as described herein. Other embodiments relate to a ceDNA vector produced by the method provided herein. In one embodiment, the capsid free (e.g., non-viral) DNA vector (ceDNA vector) for FVIII protein production is obtained from a plasmid (referred to herein as a “ceDNA-plasmid”) comprising a polynucleotide expression construct template comprising in this order: a first 5′ inverted terminal repeat (e.g. AAV ITR); a heterologous nucleic acid sequence; and a 3′ ITR (e.g. AAV ITR), where the 5′ ITR and 3′ITR can be asymmetric relative to each other, or symmetric (e.g., WT-ITRs or modified symmetric ITRs) as defined herein. According to some embodiments, the ceDNA vector is selected from the group consisting of ceDNAFVIII-vector 16, ceDNAFVIII-vector 19, ceDNAFVIII-vector 21, ceDNAFVIII-vector 8, ceDNAFVIII-vector 17, ceDNAFVIII-vector 20 and ceDNAFVIII-vector 23. According to some embodiments, the ceDNA vector is ceDNAFVIII vector 19 or ceDNAFVIII vector 23.

[0026] The ceDNA vector for expression of the FVIII protein as disclosed herein is obtainable by a number of means that would be known to the ordinarily skilled artisan after reading this disclosure. For example, a polynucleotide expression construct template used for generating the ceDNA vectors of the present invention can be a ceDNA-plasmid, a ceDNA-bacmid, and/or a ceDNA-baculovirus. In one embodiment, the ceDNA-plasmid comprises a restriction cloning site (e.g. SEQ ID NO: 123 and/or 124) operably positioned between the ITRs where an expression cassette comprising e.g., a promoter operatively linked to a transgene, e.g., a nucleic acid encoding FVIII can be inserted. In some embodiments, ceDNA vectors for expression of FVIII protein are produced from a polynucleotide template (e.g., ceDNA-plasmid, ceDNA-bacmid, ceDNA-baculovirus) containing symmetric or asymmetric ITRs (modified or WT ITRs).

[0027] In a permissive host cell, in the presence of e.g., Rep, the polynucleotide template having at least two ITRs replicates to produce ceDNA vectors expressing the FVIII protein. ceDNA vector production undergoes two steps: first, excision (“rescue”) of template from the template backbone (e.g. ceDNA-plasmid, ceDNA-bacmid, ceDNA-baculovirus genome etc.) via Rep proteins, and second, Rep mediated replication of the excised ceDNA vector. Rep proteins and Rep binding sites of the various AAV serotypes are well known to those of ordinary skill in the art. One of ordinary skill understands to choose a Rep protein from a serotype that binds to and replicates the nucleic acid sequence based upon at least one functional ITR. For example, if the replication competent ITR is from AAV serotype 2, the corresponding Rep would be from an AAV serotype that works with that serotype such as AAV2 ITR with AAV2 or AAV4 Rep but not AAV5 Rep, which does not. Upon replication, the covalently-closed ended ceDNA vector continues to accumulate in permissive cells and ceDNA vector is preferably sufficiently stable overtime in the presence of Rep protein under standard replication conditions, e.g. to accumulate in an amount that is at least 1 pg/cell, preferably at least 2 pg/cell, preferably at least 3 pg/cell, more preferably at least 4 pg/cell, even more preferably at least 5 pg/cell.

[0028] Accordingly, one aspect of the invention relates to a process of producing a ceDNA vector for expression of such FVIII proteins comprising the steps of: a) incubating a population of host cells (e.g. insect cells) harboring the polynucleotide expression construct template (e.g., a ceDNA-plasmid, a ceDNA-bacmid, and/or a ceDNA-baculovirus), which is devoid of viral capsid coding sequences, in the presence of a Rep protein under conditions effective and for a time sufficient to induce production of the ceDNA vector within the host cells, and wherein the host cells do not comprise viral capsid coding sequences; and b) harvesting and isolating the ceDNA vector from the host cells. The presence of Rep protein induces replication of the vector polynucleotide with a modified ITR to produce the ceDNA vector for expression of FVIII protein in a host cell. However, no viral particles (e.g. AAV virions) are expressed. Thus, there is no virion-enforced size limitation. According to some embodiments, the ceDNA vector is selected from the group consisting of ceDNAFVIII-vector 16, ceDNAFVIII-vector 19, ceDNAFVIII-vector 21, ceDNAFVIII-vector 8, ceDNAFVIII-vector 17, ceDNAFVIII-vector 20 and ceDNAFVIII-vector 23. According to some embodiments, the ceDNA vector is ceDNAFVIII vector 19 or ceDNAFVIII vector 23.

[0029] The presence of the ceDNA vector useful for expression of FVIII protein is isolated from the host cells can be confirmed by digesting DNA isolated from the host cell with a restriction enzyme having a single recognition site on the ceDNA vector and analyzing the digested DNA material on denaturing and non-denaturing gels to confirm the presence of characteristic bands of linear and continuous DNA as compared to linear and non-continuous DNA.

[0030] Also provided herein are methods of expressing an FVIII protein that has therapeutic uses, using a ceDNA vector in a cell or subject. Such FVIII proteins can be used for the treatment of hemophilia A. Accordingly, provided herein are methods for the treatment of hemophilia A comprising administering a ceDNA vector encoding a therapeutic FVIII protein to a subject in need thereof. According to some embodiments, the ceDNA vector encoding a therapeutic FVIII protein is selected from the group consisting of ceDNAFVIII-vector 16, ceDNAFVIII-vector 19, ceDNAFVIII-vector 21, ceDNAFVIII-vector 8, ceDNAFVIII-vector 17, ceDNAFVIII-vector 20 and ceDNAFVIII-vector 23. According to some embodiments, the ceDNA vector is ceDNAFVIII vector 19 or ceDNAFVIII vector 23. According to some embodiments, levels of FVIII in the serum of the subject are increased in subjects administered the ceDNA vector compared to a control. According to some embodiments, the increase in levels of FVIII is greater than about 40% compared to the control. According to some embodiments, the increase in levels of FVIII is greater than about 40%, about 45%, about 50%, about 55%, about 60%, about 65%, about 70%, about 75% compared to the control.

[0031] In some embodiments, one aspect of the technology described herein relates to a non-viral capsid-free DNA vector with covalently-closed ends (ceDNA vector), wherein the ceDNA vector comprises at least one heterologous nucleotide sequence, operably positioned between two inverted terminal repeat sequences where the ITR sequences can be asymmetric, or symmetric, or substantially symmetrical as these terms are defined herein, wherein at least one of the ITRs comprises a functional terminal resolution site and a Rep binding site, and optionally the heterologous nucleic acid sequence encodes a transgene (e.g., FVIII protein) and wherein the vector is not in a viral capsid.

[0032] These and other aspects of the invention are described in further detail below.

### DESCRIPTION OF DRAWINGS

[0033] Embodiments of the present disclosure, briefly summarized above and discussed in greater detail below, can be understood by reference to the illustrative embodiments of the disclosure depicted in the appended drawings. However, the appended drawings illustrate only typical embodiments of the disclosure and are therefore not to be considered limiting of scope, for the disclosure may admit to other equally effective embodiments.

[0034] FIG. 1A illustrates an exemplary structure of a ceDNA vector for expression of an FVIII protein as disclosed herein, comprising asymmetric ITRs. In this embodiment, the exemplary ceDNA vector comprises an expression cassette containing CAG promoter, WPRE, and BGHpA. An open reading frame (ORF) encoding the FVIII transgene can be inserted into the cloning site (R3/R4) between the CAG promoter and WPRE. The expression cassette is flanked by two inverted terminal repeats (ITRs)—the wild-type AAV2 ITR on the upstream (5′-end) and the modified ITR on the downstream (3′-end) of the expression cassette, therefore the two ITRs flanking the expression cassette are asymmetric with respect to each other.

[0035] FIG. 1B illustrates an exemplary structure of a ceDNA vector for expression of the FVIII as disclosed herein comprising asymmetric ITRs with an expression cassette containing CAG promoter, WPRE, and BGHpA. An open reading frame (ORF) encoding the FVIII transgene can be inserted into the cloning site between CAG promoter and WPRE. The expression cassette is flanked by two inverted terminal repeats (ITRs)—a modified ITR on the upstream (5′-end) and a wild-type ITR on the downstream (3′-end) of the expression cassette.

[0036] FIG. 1C illustrates an exemplary structure of a ceDNA vector for expression of the FVIII as disclosed herein comprising asymmetric ITRs, with an expression cassette containing an enhancer/promoter, the FVIII transgene, a post transcriptional element (WPRE), and a polyA signal. An open reading frame (ORF) allows insertion of the FVIII transgene into the cloning site between CAG promoter and WPRE. The expression cassette is flanked by two inverted terminal repeats (ITRs) that are asymmetrical with respect to each other; a modified ITR on the upstream (5′-end) and a modified ITR on the downstream (3′-end) of the expression cassette, where the 5′ ITR and the 3′ITR are both modified ITRs but have different modifications (i.e., they do not have the same modifications).

[0037] FIG. 1D illustrates an exemplary structure of a ceDNA vector for expression of the FVIII as disclosed herein, comprising symmetric modified ITRs, or substantially symmetrical modified ITRs as defined herein, with an expression cassette containing CAG promoter, WPRE, and BGHpA. An open reading frame (ORF) encoding the FVIII transgene is inserted into the cloning site between CAG promoter and WPRE. The expression cassette is flanked by two modified inverted terminal repeats (ITRs), where the 5′ modified ITR and the 3′ modified ITR are symmetrical or substantially symmetrical.

[0038] FIG. 1E illustrates an exemplary structure of a ceDNA vector for expression of the FVIII as disclosed herein comprising symmetric modified ITRs, or substantially symmetrical modified ITRs as defined herein, with an expression cassette containing an enhancer/promoter, a transgene, a post transcriptional element (WPRE), and a polyA signal. An open reading frame (ORF) allows insertion of a transgene (e.g., the FVIII) into the cloning site between CAG promoter and WPRE. The expression cassette is flanked by two modified inverted terminal repeats (ITRs), where the 5′ modified ITR and the 3′ modified ITR are symmetrical or substantially symmetrical.

[0039] FIG. 1F illustrates an exemplary structure of a ceDNA vector for expression of the FVIII as disclosed herein, comprising symmetric WT-ITRs, or substantially symmetrical WT-ITRs as defined herein, with an expression cassette containing CAG promoter, WPRE, and BGHpA. An open reading frame (ORF) encoding a transgene (e.g., the FVIII) is inserted into the cloning site between CAG promoter and WPRE. The expression cassette is flanked by two wild type inverted terminal repeats (WT-ITRs), where the 5′ WT-ITR and the 3′ WT ITR are symmetrical or substantially symmetrical.

[0040] FIG. 1G illustrates an exemplary structure of a ceDNA vector for expression of the FVIII as disclosed herein, comprising symmetric modified ITRs, or substantially symmetrical modified ITRs as defined herein, with an expression cassette containing an enhancer/promoter, a transgene (e.g., the FVIII), a post transcriptional element (WPRE), and a polyA signal. An open reading frame (ORF) allows insertion of a transgene (e.g., the FVIII) into the cloning site between CAG promoter and WPRE. The expression cassette is flanked by two wild type inverted terminal repeats (WT-ITRs), where the 5′ WT-ITR and the 3′ WT ITR are symmetrical or substantially symmetrical.

[0041] FIG. 2A provides the T-shaped stem-loop structure of a wild-type left ITR of AAV2 (SEQ ID NO: 52) with identification of A-A′ arm, B-B′ arm, C-C′ arm, two Rep binding sites (RBE and RBE′) and also shows the terminal resolution site (TRS). The RBE contains a series of 4 duplex tetramers that are believed to interact with either Rep 78 or Rep 68. In addition, the RBE′ is also believed to interact with Rep complex assembled on the wild-type ITR or mutated ITR in the construct. The D and D′ regions contain transcription factor binding sites and other conserved structure. FIG. 2B shows proposed Rep-catalyzed nicking and ligating activities in a wild-type left ITR (SEQ ID NO: 53), including the T-shaped stem-loop structure of the wild-type left ITR of AAV2 with identification of A-A′ arm, B-B′ arm, C-C′ arm, two Rep Binding sites (RBE and RBE′) and also shows the terminal resolution site (TRS), and the D and D′ region comprising several transcription factor binding sites and other conserved structure.

[0042] FIG. 3A provides the primary structure (polynucleotide sequence) (left) and the secondary structure (right) of the RBE-containing portions of the A-A′ arm, and the C-C′ and B-B′ arm of the wild type left AAV2 ITR (SEQ ID NO: 54). FIG. 3B shows an exemplary mutated ITR (also referred to as a modified ITR) sequence for the left ITR. Shown is the primary structure (left) and the predicted secondary structure (right) of the RBE portion of the A-A′ arm, the C arm and B-B′ arm of an exemplary mutated left ITR (ITR-1, left) (SEQ ID NO: 113). FIG. 3C shows the primary structure (left) and the secondary structure (right) of the RBE-containing portion of the A-A′ loop, and the B-B′ and C-C′ arms of wild type right AAV2 ITR (SEQ ID NO: 55). FIG. 3D shows an exemplary right modified ITR. Shown is the primary structure (left) and the predicted secondary structure (right) of the RBE containing portion of the A-A′ arm, the B-B′ and the C arm of an exemplary mutant right ITR (ITR-1, right) (SEQ ID NO: 114). Any combination of left and right ITR (e.g., AAV2 ITRs or other viral serotype or synthetic ITRs) can be used as taught herein. Each of FIGS. 3A-3D polynucleotide sequences refer to the sequence used in the plasmid or bacmid/baculovirus genome used to produce the ceDNA as described herein. Also included in each of FIGS. 3A-3D are corresponding ceDNA secondary structures inferred from the ceDNA vector configurations in the plasmid or bacmid/baculovirus genome and the predicted Gibbs free energy values.

[0043] FIG. 4A is a schematic illustrating an upstream process for making baculovirus infected insect cells (BIICs) that are useful in the production of a ceDNA vector for expression of the FVIII as disclosed herein in the process described in the schematic in FIG. 4B. FIG. 4B is a schematic of an exemplary method of ceDNA production and FIG. 4C illustrates a biochemical method and process to confirm ceDNA vector production. FIG. 4D and FIG. 4E are schematic illustrations describing a process for identifying the presence of ceDNA in DNA harvested from cell pellets obtained during the ceDNA production processes in FIG. 4B. FIG. 4D shows schematic expected bands for an exemplary ceDNA either left uncut or digested with a restriction endonuclease and then subjected to electrophoresis on either a native gel or a denaturing gel. The leftmost schematic is a native gel, and shows multiple bands suggesting that in its duplex and uncut form ceDNA exists in at least monomeric and dimeric states, visible as a faster-migrating smaller monomer and a slower-migrating dimer that is twice the size of the monomer. The schematic second from the left shows that when ceDNA is cut with a restriction endonuclease, the original bands are gone and faster-migrating (e.g., smaller) bands appear, corresponding to the expected fragment sizes remaining after the cleavage. Under denaturing conditions, the original duplex DNA is single-stranded and migrates as a species twice as large as observed on native gel because the complementary strands are covalently linked. Thus, in the second schematic from the right, the digested ceDNA shows a similar banding distribution to that observed on native gel, but the bands migrate as fragments twice the size of their native gel counterparts. The rightmost schematic shows that uncut ceDNA under denaturing conditions migrates as a single-stranded open circle, and thus the observed bands are twice the size of those observed under native conditions where the circle is not open. In this figure “kb” is used to indicate relative size of nucleotide molecules based, depending on context, on either nucleotide chain length (e.g., for the single stranded molecules observed in denaturing conditions) or number of base pairs (e.g., for the double-stranded molecules observed in native conditions). FIG. 4E shows DNA having a non-continuous structure. The ceDNA can be cut by a restriction endonuclease, having a single recognition site on the ceDNA vector, and generate two DNA fragments with different sizes (1 kb and 2 kb) in both neutral and denaturing conditions. FIG. 4E also shows a ceDNA having a linear and continuous structure. The ceDNA vector can be cut by the restriction endonuclease and generate two DNA fragments that migrate as 1 kb and 2 kb in neutral conditions, but in denaturing conditions, the stands remain connected and produce single strands that migrate as 2 kb and 4 kb.

[0044] FIG. 5 is an exemplary picture of a denaturing gel running examples of ceDNA vectors with (+) or without (−) digestion with endonucleases (EcoRI for ceDNA construct 1 and 2; BamH1 for ceDNA construct 3 and 4; SpeI for ceDNA construct 5 and 6; and XhoI for ceDNA construct 7 and 8) Constructs 1-8 are described in Example 1 of International Application PCT PCT/US18/49996, which is incorporated herein in its entirety by reference. Sizes of bands highlighted with an asterisk were determined and provided on the bottom of the picture.

[0045] FIG. 6 depicts the results of the experiments described in Example 7 and specifically shows the IVIS images obtained from mice treated with LNP-polyC control (mouse furthest to the left) and four mice treated with LNP-ceDNA-Luciferase (all but the mouse furthest to the left). The four ceDNA-treated mice show significant fluorescence in the liver-containing region of the mouse.

[0046] FIG. 7 depicts the results of the experiment described in Example 8. The dark specks indicate the presence of the protein resulting from the expressed ceDNA transgene and demonstrate association of the administered LNP-ceDNA with hepatocytes.

[0047] FIGS. 8A and 8B depict the results of the ocular studies set forth in Example 9. FIG. 8A shows representative IVIS images from JetPEI®-ceDNA-Luciferase-injected rat eyes (upper left) versus uninjected eye in the same rat (upper right) or plasmid-Luciferase DNA-injected rat eye (lower left) and the uninjected eye in that same rat (lower right). FIG. 8B shows a graph of the average radiance observed in treated eyes or the corresponding untreated eyes in each of the treatment groups. The ceDNA-treated rats demonstrated prolonged significant fluorescence (and hence luciferase transgene expression) over 99 days, in sharp contrast to rats treated with plasmid-luciferase where minimal relative fluorescence (and hence luciferase transgene expression) was observed.

[0048] FIGS. 9A and 9B depict the results of the ceDNA persistence and redosing study in Rag2 mice described in Example 10. FIG. 9A shows a graph of total flux overtime observed in LNP-ceDNA-Luc-treated wild-type c57bl/6 mice or Rag2 mice. FIG. 9B provides a graph showing the impact of redose on expression levels of the luciferase transgene in Rag2 mice, with resulting increased stable expression observed after redose (arrow indicates time of redose administration).

[0049] FIG. 10 provides data from the ceDNA luciferase expression study in treated mice described in Example 11, showing total flux in each group of mice over the duration of the study. High levels of unmethylated CpG correlated with lower total flux observed in the mice over time, while use of a liver-specific promoter correlated with durable, stable expression of the transgene from the ceDNA vector over at least 77 days.

[0050] FIGS. 11A and 11B show hydrodynamic delivery of ceDNA vector expressing FVIII. FIG. 11A shows FVIII expression levels in serum samples at day 3 and 7 from mice after hydrodynamic injection of three different ceDNA vectors expressing FVIII (LPS1-F8-v1; LPS1-F8-v2; LPS1-F8-v3), or a control ceDNA vector (a ceDNA expressing luciferase only) (shown as Vehicle). Two of the three ceDNA vectors expressing FVIII showed FVIII expression. FIG. 11B is a dose-response graph of FVIII expression levels in serum samples over a 30 day period of from mice after hydrodynamic injection with either low or high amounts of the three different ceDNA vectors expressing FVIII (LPS1-F8-v1; LPS1-F8-v2; LPS1-F8-v3), or high amounts of the vehicle control ceDNA vector (expressing luciferase only).

[0051] FIG. 12 is a graph that depicts plasma FVIII concentration (IU/ml) 3 days after hydrodynamic delivery of various ceDNA vectors expressing FVIII (ceDNAFVIII-vector 4, ceDNAFVIII-vector 6, ceDNAFVIII-vector 12, ceDNAFVIII-vector 14, ceDNAFVIII-vector 16, ceDNAFVIII-vector 18, ceDNAFVIII-vector 19, ceDNAFVIII-vector 21, ceDNAFVIII-vector 22). ceDNAFVIII-vector 16, ceDNAFVIII-vector 19 and ceDNAFVIII-vector 21 showed the highest plasma Factor VIII concentration after 3 days. Vehicle only was used as control.

[0052] FIG. 13 is a graph that depicts plasma FVIII concentration (IU/ml) 3 days after hydrodynamic delivery of various ceDNA vectors expressing FVIII (ceDNAFVIII-vector 1, ceDNAFVIII-vector 2, ceDNAFVIII-vector 3, ceDNAFVIII-vector 5, ceDNAFVIII-vector 7, ceDNAFVIII-vector 8, ceDNAFVIII-vector 12, ceDNAFVIII-vector 13, ceDNAFVIII-vector 15). ceDNAFVIII-vector 8 showed the highest plasma Factor VIII concentration after 3 days. Vehicle only was used as control.

[0053] FIG. 14 is a graph that depicts plasma FVIII concentration (IU/ml) 3 days after hydrodynamic delivery of various ceDNA vectors expressing FVIII (ceDNAFVIII-vector 9, ceDNAFVIII-vector 10, ceDNAFVIII-vector 11, ceDNAFVIII-vector 12, ceDNAFVIII-vector 17, ceDNAFVIII-vector 20, ceDNAFVIII-vector 24, ceDNAFVIII-vector 25, ceDNAFVIII-vector 26). ceDNAFVIII-vector 17 and ceDNAFVIII-vector 20 showed the highest plasma Factor VIII concentration after 3 days. Vehicle only was used as control.

[0054] FIG. 15 is a graph that depicts plasma FVIII concentration (IU/ml) 1 day after hydrodynamic delivery of escalating doses of ceDNAFVIII-vector 23 (0.005 μg-50 μg). As shown in FIG. 15, plasma FVIII increased in a dose-dependent manner with increasing dosage of ceDNAFVIII-vector 23. Vehicle only was used as control.

[0055] FIG. 16 is a graph that depicts plasma FVIII concentration (IU/mL) at 7 days after hydrodynamic delivery of the LNP:ceDNAFVIII-vector 23 test article.

### DETAILED DESCRIPTION OF THE INVENTION

[0056] Provided herein is a method for treating hemophilia A using a ceDNA vector comprising one or more nucleic acids that encode an FVIII therapeutic protein or fragment thereof. Also provided herein are ceDNA vectors for expression of FVIII protein as described herein comprising one or more heterologous nucleic acids that encode for the FVIII protein. In some embodiments, the expression of FVIII protein can comprise secretion of the therapeutic protein out of the cell in which it is expressed. Alternatively, in some embodiments, the expressed FVIII protein can act or function (e.g., exert its effect) within the cell in which it is expressed. In some embodiments, the ceDNA vector expresses FVIII protein in the liver, a muscle (e.g., skeletal muscle) of a subject, or other body part, which can act as a depot for FVIII therapeutic protein production and secretion to many systemic compartments.

### I. Definitions

[0057] Unless otherwise defined herein, scientific and technical terms used in connection with the present application shall have the meanings that are commonly understood by those of ordinary skill in the art to which this disclosure belongs. It should be understood that this invention is not limited to the particular methodology, protocols, and reagents, etc., described herein and as such can vary. The terminology used herein is for the purpose of describing particular embodiments only and is not intended to limit the scope of the present invention, which is defined solely by the claims. Definitions of common terms in immunology and molecular biology can be found in The Merck Manual of Diagnosis and Therapy, 19th Edition, published by Merck Sharp & Dohme Corp., 2011 (ISBN 978-0-911910-19-3); Robert S. Porter et al. (eds.), Fields Virology, 6^{th} Edition, published by Lippincott Williams & Wilkins, Philadelphia, PA, USA (2013), Knipe, D. M. and Howley, P. M. (ed.), The Encyclopedia of Molecular Cell Biology and Molecular Medicine, published by Blackwell Science Ltd., 1999-2012 (ISBN 9783527600908); and Robert A. Meyers (ed.), Molecular Biology and Biotechnology: a Comprehensive Desk Reference, published by VCH Publishers, Inc., 1995 (ISBN 1-56081-569-8); Immunology by Werner Luttmann, published by Elsevier, 2006; Janeway's Immunobiology, Kenneth Murphy, Allan Mowat, Casey Weaver (eds.), Taylor & Francis Limited, 2014 (ISBN 0815345305, 9780815345305); Lewin's Genes XI, published by Jones & Bartlett Publishers, 2014 (ISBN-1449659055); Michael Richard Green and Joseph Sambrook, Molecular Cloning: A Laboratory Manual, 4^{th} ed., Cold Spring Harbor Laboratory Press, Cold Spring Harbor, N.Y., USA (2012) (ISBN 1936113414); Davis et al., Basic Methods in Molecular Biology, Elsevier Science Publishing, Inc., New York, USA (2012) (ISBN 044460149X); Laboratory Methods in Enzymology: DNA, Jon Lorsch (ed.) Elsevier, 2013 (ISBN 0124199542); Current Protocols in Molecular Biology (CPMB), Frederick M. Ausubel (ed.), John Wiley and Sons, 2014 (ISBN047150338X, 9780471503385), Current Protocols in Protein Science (CPPS), John E. Coligan (ed.), John Wiley and Sons, Inc., 2005; and Current Protocols in Immunology (CPI) (John E. Coligan, A D A M Kruisbeek, David H Margulies, Ethan M Shevach, Warren Strobe, (eds.) John Wiley and Sons, Inc., 2003 (ISBN 0471142735, 9780471142737), the contents of which are all incorporated by reference herein in their entireties.

[0058] As used herein, the terms, “administration,” “administering” and variants thereof refers to introducing a composition or agent (e.g., a therapeutic nucleic acid or an immunosuppressant as described herein) into a subject and includes concurrent and sequential introduction of one or more compositions or agents. “Administration” can refer, e.g., to therapeutic, pharmacokinetic, diagnostic, research, placebo, and experimental methods. “Administration” also encompasses in vitro and ex vivo treatments. The introduction of a composition or agent into a subject is by any suitable route, including orally, pulmonarily, intranasally, parenterally (intravenously, intramuscularly, intraperitoneally, or subcutaneously), rectally, intralymphatically, intratumorally, or topically. The introduction of a composition or agent into a subject is by electroporation. Administration includes self-administration and the administration by another. Administration can be carried out by any suitable route. A suitable route of administration allows the composition or the agent to perform its intended function. For example, if a suitable route is intravenous, the composition is administered by introducing the composition or agent into a vein of the subject.

[0059] As used herein, the phrases “nucleic acid therapeutic”, “therapeutic nucleic acid” and “TNA” are used interchangeably and refer to any modality of therapeutic using nucleic acids as an active component of therapeutic agent to treat a disease or disorder. As used herein, these phrases refer to RNA-based therapeutics and DNA-based therapeutics. Non-limiting examples of RNA-based therapeutics include mRNA, antisense RNA and oligonucleotides, ribozymes, aptamers, interfering RNAs (RNAi), Dicer-substrate dsRNA, small hairpin RNA (shRNA), asymmetrical interfering RNA (aiRNA), microRNA (miRNA). Non-limiting examples of DNA-based therapeutics include minicircle DNA, minigene, viral DNA (e.g., Lentiviral or AAV genome) or non-viral synthetic DNA vectors, closed-ended linear duplex DNA (ceDNA/CELiD), plasmids, bacmids, doggybone (dbDNA™) DNA vectors, minimalistic immunological-defined gene expression (MIDGE)-vector, nonviral ministring DNA vector (linear-covalently closed DNA vector), or dumbbell-shaped DNA minimal vector (“dumbbell DNA”).

[0060] As used herein, an “effective amount” or “therapeutically effective amount” of a therapeutic agent, such as a FVIII therapeutic protein or fragment thereof, is an amount sufficient to produce the desired effect, e.g., treatment or prevention of hemophilia A. Suitable assays for measuring expression of a target gene or target sequence include, e.g., examination of protein or RNA levels using techniques known to those of skill in the art such as dot blots, northern blots, in situ hybridization, ELISA, immunoprecipitation, enzyme function, as well as phenotypic assays known to those of skill in the art. However, dosage levels are based on a variety of factors, including the type of injury, the age, weight, sex, medical condition of the patient, the severity of the condition, the route of administration, and the particular active agent employed. Thus, the dosage regimen may vary widely, but can be determined routinely by a physician using standard methods. Additionally, the terms “therapeutic amount”, “therapeutically effective amounts” and “pharmaceutically effective amounts” include prophylactic or preventative amounts of the compositions of the described invention. In prophylactic or preventative applications of the described invention, pharmaceutical compositions or medicaments are administered to a patient susceptible to, or otherwise at risk of, a disease, disorder or condition in an amount sufficient to eliminate or reduce the risk, lessen the severity, or delay the onset of the disease, disorder or condition, including biochemical, histologic and/or behavioral symptoms of the disease, disorder or condition, its complications, and intermediate pathological phenotypes presenting during development of the disease, disorder or condition. It is generally preferred that a maximum dose be used, that is, the highest safe dose according to some medical judgment. According to some embodiments, the disease, disorder or condition is hemophilia A. The terms “dose” and “dosage” are used interchangeably herein.

[0061] As used herein the term “therapeutic effect” refers to a consequence of treatment, the results of which are judged to be desirable and beneficial. A therapeutic effect can include, directly or indirectly, the arrest, reduction, or elimination of a disease manifestation. A therapeutic effect can also include, directly or indirectly, the arrest reduction or elimination of the progression of a disease manifestation.

[0062] For any therapeutic agent described herein therapeutically effective amount may be initially determined from preliminary in vitro studies and/or animal models. A therapeutically effective dose may also be determined from human data. The applied dose may be adjusted based on the relative bioavailability and potency of the administered compound. Adjusting the dose to achieve maximal efficacy based on the methods described above and other well-known methods is within the capabilities of the ordinarily skilled artisan. General principles for determining therapeutic effectiveness, which may be found in Chapter 1 of Goodman and Gilman's The Pharmacological Basis of Therapeutics, 10^{th} Edition, McGraw-Hill (New York) (2001), incorporated herein by reference, are summarized below.

[0063] Pharmacokinetic principles provide a basis for modifying a dosage regimen to obtain a desired degree of therapeutic efficacy with a minimum of unacceptable adverse effects. In situations where the drug's plasma concentration can be measured and related to therapeutic window, additional guidance for dosage modification can be obtained.

[0064] As used herein, the terms “heterologous nucleotide sequence” and “transgene” are used interchangeably and refer to a nucleic acid of interest (other than a nucleic acid encoding a capsid polypeptide) that is incorporated into and may be delivered and expressed by a ceDNA vector as disclosed herein.

[0065] As used herein, the terms “expression cassette” and “transcription cassette” are used interchangeably and refer to a linear stretch of nucleic acids that includes a transgene that is operably linked to one or more promoters or other regulatory sequences sufficient to direct transcription of the transgene, but which does not comprise capsid-encoding sequences, other vector sequences or inverted terminal repeat regions. An expression cassette may additionally comprise one or more cis-acting sequences (e.g., promoters, enhancers, or repressors), one or more introns, and one or more post-transcriptional regulatory elements.

[0066] The terms “polynucleotide” and “nucleic acid,” used interchangeably herein, refer to a polymeric form of nucleotides of any length, either ribonucleotides or deoxyribonucleotides. Thus, this term includes single, double, or multi-stranded DNA or RNA, genomic DNA, cDNA, DNA-RNA hybrids, or a polymer including purine and pyrimidine bases or other natural, chemically or biochemically modified, non-natural, or derivatized nucleotide bases. “Oligonucleotide” generally refers to polynucleotides of between about 5 and about 100 nucleotides of single- or double-stranded DNA. However, for the purposes of this disclosure, there is no upper limit to the length of an oligonucleotide. Oligonucleotides are also known as “oligomers” or “oligos” and may be isolated from genes, or chemically synthesized by methods known in the art. The terms “polynucleotide” and “nucleic acid” should be understood to include, as applicable to the embodiments being described, single-stranded (such as sense or antisense) and double-stranded polynucleotides. DNA may be in the form of, e.g., antisense molecules, plasmid DNA, DNA-DNA duplexes, pre-condensed DNA, PCR products, vectors (P1, PAC, BAC, YAC, artificial chromosomes), expression cassettes, chimeric sequences, chromosomal DNA, or derivatives and combinations of these groups. DNA may be in the form of minicircle, plasmid, bacmid, minigene, ministring DNA (linear covalently closed DNA vector), closed-ended linear duplex DNA (CELiD or ceDNA), doggybone (dbDNA™) DNA, dumbbell shaped DNA, minimalistic immunological-defined gene expression (MIDGE)-vector, viral vector or nonviral vectors. RNA may be in the form of small interfering RNA (siRNA), Dicer-substrate dsRNA, small hairpin RNA (shRNA), asymmetrical interfering RNA (aiRNA), microRNA (miRNA), mRNA, rRNA, tRNA, viral RNA (vRNA), and combinations thereof. Nucleic acids include nucleic acids containing known nucleotide analogs or modified backbone residues or linkages, which are synthetic, naturally occurring, and non-naturally occurring, and which have similar binding properties as the reference nucleic acid. Examples of such analogs and/or modified residues include, without limitation, phosphorothioates, phosphorodiamidate morpholino oligomer (morpholino), phosphoramidates, methyl phosphonates, chiral-methyl phosphonates, 2′-O-methyl ribonucleotides, locked nucleic acid (LNA™), and peptide nucleic acids (PNAs). Unless specifically limited, the term encompasses nucleic acids containing known analogues of natural nucleotides that have similar binding properties as the reference nucleic acid. Unless otherwise indicated, a particular nucleic acid sequence also implicitly encompasses conservatively modified variants thereof (e.g., degenerate codon substitutions), alleles, orthologs, SNPs, and complementary sequences as well as the sequence explicitly indicated.

[0067] “Nucleotides” contain a sugar deoxyribose (DNA) or ribose (RNA), a base, and a phosphate group. Nucleotides are linked together through the phosphate groups.

[0068] “Bases” include purines and pyrimidines, which further include natural compounds adenine, thymine, guanine, cytosine, uracil, inosine, and natural analogs, and synthetic derivatives of purines and pyrimidines, which include, but are not limited to, modifications which place new reactive groups such as, but not limited to, amines, alcohols, thiols, carboxylates, and alkylhalides.

[0069] As used herein, the term “interfering RNA” or “RNAi” or “interfering RNA sequence” includes single-stranded RNA (e.g., mature miRNA, ssRNAi oligonucleotides, ssDNAi oligonucleotides), double-stranded RNA (i.e., duplex RNA such as siRNA, Dicer-substrate dsRNA, shRNA, aiRNA, or pre-miRNA), a DNA-RNA hybrid (see, e.g., PCT Publication No. WO 2004/078941), or a DNA-DNA hybrid (see, e.g., PCT Publication No. WO 2004/104199) that is capable of reducing or inhibiting the expression of a target gene or sequence (e.g., by mediating the degradation or inhibiting the translation of mRNAs which are complementary to the interfering RNA sequence) when the interfering RNA is in the same cell as the target gene or sequence. Interfering RNA thus refers to the single-stranded RNA that is complementary to a target mRNA sequence or to the double-stranded RNA formed by two complementary strands or by a single, self-complementary strand. Interfering RNA may have substantial or complete identity to the target gene or sequence, or may comprise a region of mismatch (i.e., a mismatch motif). The sequence of the interfering RNA can correspond to the full-length target gene, or a subsequence thereof. Preferably, the interfering RNA molecules are chemically synthesized. The disclosures of each of the above patent documents are herein incorporated by reference in their entirety for all purposes.

[0070] Interfering RNA includes “small-interfering RNA” or “siRNA,” e.g., interfering RNA of about 15-60, 15-50, or 15-40 (duplex) nucleotides in length, more typically about 15-30, 15-25, or 19-25 (duplex) nucleotides in length, and is preferably about 20-24, 21-22, or 21-23 (duplex) nucleotides in length (e.g., each complementary sequence of the double-stranded siRNA is 15-60, 15-50, 15-40, 15-30, 15-25, or 19-25 nucleotides in length, preferably about 20-24, 21-22, or 21-23 nucleotides in length, and the double-stranded siRNA is about 15-60, 15-50, 15-40, 15-30, 15-25, or 19-25 base pairs in length, preferably about 18-22, 19-20, or 19-21 base pairs in length). siRNA duplexes may comprise 3′ overhangs of about 1 to about 4 nucleotides or about 2 to about 3 nucleotides and 5′ phosphate termini. Examples of siRNA include, without limitation, a double-stranded polynucleotide molecule assembled from two separate stranded molecules, wherein one strand is the sense strand and the other is the complementary antisense strand; a double-stranded polynucleotide molecule assembled from a single stranded molecule, where the sense and antisense regions are linked by a nucleic acid-based or non-nucleic acid-based linker; a double-stranded polynucleotide molecule with a hairpin secondary structure having self-complementary sense and antisense regions; and a circular single-stranded polynucleotide molecule with two or more loop structures and a stem having self-complementary sense and antisense regions, where the circular polynucleotide can be processed in vivo or in vitro to generate an active double-stranded siRNA molecule. As used herein, the term “siRNA” includes RNA-RNA duplexes as well as DNA-RNA hybrids (see, e.g., PCT Publication No. WO 2004/078941).

[0071] The term “nucleic acid construct” as used herein refers to a nucleic acid molecule, either single- or double-stranded, which is isolated from a naturally occurring gene or which is modified to contain segments of nucleic acids in a manner that would not otherwise exist in nature or which is synthetic. The term nucleic acid construct is synonymous with the term “expression cassette” when the nucleic acid construct contains the control sequences required for expression of a coding sequence of the present disclosure. An “expression cassette” includes a DNA coding sequence operably linked to a promoter.

[0072] By “hybridizable” or “complementary” or “substantially complementary” it is meant that a nucleic acid (e.g., RNA) includes a sequence of nucleotides that enables it to non-covalently bind, i.e. form Watson-Crick base pairs and/or G/U base pairs, “anneal”, or “hybridize,” to another nucleic acid in a sequence-specific, antiparallel, manner (i.e., a nucleic acid specifically binds to a complementary nucleic acid) under the appropriate in vitro and/or in vivo conditions of temperature and solution ionic strength. As is known in the art, standard Watson-Crick base-pairing includes: adenine (A) pairing with thymidine (T), adenine (A) pairing with uracil (U), and guanine (G) pairing with cytosine (C). In addition, it is also known in the art that for hybridization between two RNA molecules (e.g., dsRNA), guanine (G) base pairs with uracil (U). For example, G/U base-pairing is partially responsible for the degeneracy (i.e., redundancy) of the genetic code in the context of tRNA anti-codon base-pairing with codons in mRNA. In the context of this disclosure, a guanine (G) of a protein-binding segment (dsRNA duplex) of a subject DNA-targeting RNA molecule is considered complementary to an uracil (U), and vice versa. As such, when a G/U base-pair can be made at a given nucleotide position a protein-binding segment (dsRNA duplex) of a subject DNA-targeting RNA molecule, the position is not considered to be non-complementary, but is instead considered to be complementary.

[0073] The terms “peptide,” “polypeptide,” and “protein” are used interchangeably herein, and refer to a polymeric form of amino acids of any length, which can include coded and non-coded amino acids, chemically or biochemically modified or derivatized amino acids, and polypeptides having modified peptide backbones.

[0074] A DNA sequence that “encodes” a particular FVIII protein is a DNA nucleic acid sequence that is transcribed into the particular RNA and/or protein. A DNA polynucleotide may encode an RNA (mRNA) that is translated into protein, or a DNA polynucleotide may encode an RNA that is not translated into protein (e.g., tRNA, rRNA, or a DNA-targeting RNA; also called “non-coding” RNA or ncRNA”).

[0075] As used herein, the term “fusion protein” as used herein refers to a polypeptide which comprises protein domains from at least two different proteins. For example, a fusion protein may comprise (i) FVIII or fragment thereof and (ii) at least one non-GOI protein. Fusion proteins encompassed herein include, but are not limited to, an antibody, or Fc or antigen-binding fragment of an antibody fused to a FVIII protein, e.g., an extracellular domain of a receptor, ligand, enzyme or peptide. The FVIII protein or fragment thereof that is part of a fusion protein can be a monospecific antibody or a bispecific or multispecific antibody.

[0076] As used herein, the term “genomic safe harbor gene” or “safe harbor gene” refers to a gene or loci that a nucleic acid sequence can be inserted such that the sequence can integrate and function in a predictable manner (e.g., express a protein of interest) without significant negative consequences to endogenous gene activity, or the promotion of cancer. In some embodiments, a safe harbor gene is also a loci or gene where an inserted nucleic acid sequence can be expressed efficiently and at higher levels than a non-safe harbor site.

[0077] As used herein, the term “gene delivery” means a process by which foreign DNA is transferred to host cells for applications of gene therapy.

[0078] As used herein, the term “terminal repeat” or “TR” includes any viral terminal repeat or synthetic sequence that comprises at least one minimal required origin of replication and a region comprising a palindrome hairpin structure. A Rep-binding sequence (“RBS”) (also referred to as RBE (Rep-binding element)) and a terminal resolution site (“TRS”) together constitute a “minimal required origin of replication” and thus the TR comprises at least one RBS and at least one TRS. TRs that are the inverse complement of one another within a given stretch of polynucleotide sequence are typically each referred to as an “inverted terminal repeat” or “ITR”. In the context of a virus, ITRs mediate replication, virus packaging, integration and provirus rescue. As was unexpectedly found in the invention herein, TRs that are not inverse complements across their full length can still perform the traditional functions of ITRs, and thus the term ITR is used herein to refer to a TR in a ceDNA genome or ceDNA vector that is capable of mediating replication of ceDNA vector. It will be understood by one of ordinary skill in the art that in complex ceDNA vector configurations more than two ITRs or asymmetric ITR pairs may be present. The ITR can be an AAV ITR or a non-AAV ITR, or can be derived from an AAV ITR or a non-AAV ITR. For example, the ITR can be derived from the family Parvoviridae, which encompasses parvoviruses and dependoviruses (e.g., canine parvovirus, bovine parvovirus, mouse parvovirus, porcine parvovirus, human parvovirus B-19), or the SV40 hairpin that serves as the origin of SV40 replication can be used as an ITR, which can further be modified by truncation, substitution, deletion, insertion and/or addition. Parvoviridae family viruses consist of two subfamilies: Parvovirinae, which infect vertebrates, and Densovirinae, which infect invertebrates. Dependoparvoviruses include the viral family of the adeno-associated viruses (AAV) which are capable of replication in vertebrate hosts including, but not limited to, human, primate, bovine, canine, equine and ovine species. For convenience herein, an ITR located 5′ to (upstream of) an expression cassette in a ceDNA vector is referred to as a “5′ ITR” or a “left ITR”, and an ITR located 3′ to (downstream of) an expression cassette in a ceDNA vector is referred to as a “3′ ITR” or a “right ITR”.

[0079] A “wild-type ITR” or “WT-ITR” refers to the sequence of a naturally occurring ITR sequence in an AAV or other dependovirus that retains, e.g., Rep binding activity and Rep nicking ability. The nucleotide sequence of a WT-ITR from any AAV serotype may slightly vary from the canonical naturally occurring sequence due to degeneracy of the genetic code or drift, and therefore WT-ITR sequences encompassed for use herein include WT-ITR sequences as result of naturally occurring changes taking place during the production process (e.g., a replication error).

[0080] As used herein, the term “substantially symmetrical WT-ITRs” or a “substantially symmetrical WT-ITR pair” refers to a pair of WT-ITRs within a single ceDNA genome or ceDNA vector that are both wild type ITRs that have an inverse complement sequence across their entire length. For example, an ITR can be considered to be a wild-type sequence, even if it has one or more nucleotides that deviate from the canonical naturally occurring sequence, so long as the changes do not affect the properties and overall three-dimensional structure of the sequence. In some aspects, the deviating nucleotides represent conservative sequence changes. As one non-limiting example, a sequence that has at least 95%, 96%, 97%, 98%, or 99% sequence identity to the canonical sequence (as measured, e.g., using BLAST at default settings), and also has a symmetrical three-dimensional spatial organization to the other WT-ITR such that their 3D structures are the same shape in geometrical space. The substantially symmetrical WT-ITR has the same A, C-C′ and B-B′ loops in 3D space. A substantially symmetrical WT-ITR can be functionally confirmed as WT by determining that it has an operable Rep binding site (RBE or RBE′) and terminal resolution site (TRS) that pairs with the appropriate Rep protein. One can optionally test other functions, including transgene expression under permissive conditions.

[0081] As used herein, the phrases of “modified ITR” or “mod-ITR” or “mutant ITR” are used interchangeably herein and refer to an ITR that has a mutation in at least one or more nucleotides as compared to the WT-ITR from the same serotype. The mutation can result in a change in one or more of A, C, C′, B, B′ regions in the ITR, and can result in a change in the three-dimensional spatial organization (i.e. its 3D structure in geometric space) as compared to the 3D spatial organization of a WT-ITR of the same serotype.

[0082] As used herein, the term “asymmetric ITRs” also referred to as “asymmetric ITR pairs” refers to a pair of ITRs within a single ceDNA genome or ceDNA vector that are not inverse complements across their full length. As one non-limiting example, an asymmetric ITR pair does not have a symmetrical three-dimensional spatial organization to their cognate ITR such that their 3D structures are different shapes in geometrical space. Stated differently, an asymmetrical ITR pair have the different overall geometric structure, i.e., they have different organization of their A, C-C′ and B-B′ loops in 3D space (e.g., one ITR may have a short C-C′ arm and/or short B-B′ arm as compared to the cognate ITR). The difference in sequence between the two ITRs may be due to one or more nucleotide addition, deletion, truncation, or point mutation. In one embodiment, one ITR of the asymmetric ITR pair may be a wild-type AAV ITR sequence and the other ITR a modified ITR as defined herein (e.g., a non-wild-type or synthetic ITR sequence). In another embodiment, neither ITRs of the asymmetric ITR pair is a wild-type AAV sequence and the two ITRs are modified ITRs that have different shapes in geometrical space (i.e., a different overall geometric structure). In some embodiments, one mod-ITRs of an asymmetric ITR pair can have a short C-C′ arm and the other ITR can have a different modification (e.g., a single arm, or a short B-B′ arm etc.) such that they have different three-dimensional spatial organization as compared to the cognate asymmetric mod-ITR.

[0083] As used herein, the term “symmetric ITRs” refers to a pair of ITRs within a single ceDNA genome or ceDNA vector that are wild-type or mutated (e.g., modified relative to wild-type) dependoviral ITR sequences and are inverse complements across their full length. In one non-limiting example, both ITRs are wild type ITRs sequences from AAV2. In another example, neither ITRs are wild type ITR AAV2 sequences (i.e., they are a modified ITR, also referred to as a mutant ITR), and can have a difference in sequence from the wild type ITR due to nucleotide addition, deletion, substitution, truncation, or point mutation. For convenience herein, an ITR located 5′ to (upstream of) an expression cassette in a ceDNA vector is referred to as a “5′ ITR” or a “left ITR”, and an ITR located 3′ to (downstream of) an expression cassette in a ceDNA vector is referred to as a “3′ ITR” or a “right ITR”.

[0084] As used herein, the terms “substantially symmetrical modified-ITRs” or a “substantially symmetrical mod-ITR pair” refers to a pair of modified-ITRs within a single ceDNA genome or ceDNA vector that are both that have an inverse complement sequence across their entire length. For example, the a modified ITR can be considered substantially symmetrical, even if it has some nucleotide sequences that deviate from the inverse complement sequence so long as the changes do not affect the properties and overall shape. As one non-limiting example, a sequence that has at least 85%, 90%, 95%, 96%, 97%, 98%, or 99% sequence identity to the canonical sequence (as measured using BLAST at default settings), and also has a symmetrical three-dimensional spatial organization to their cognate modified ITR such that their 3D structures are the same shape in geometrical space. Stated differently, a substantially symmetrical modified-ITR pair have the same A, C-C′ and B-B′ loops organized in 3D space. In some embodiments, the ITRs from a mod-ITR pair may have different reverse complement nucleotide sequences but still have the same symmetrical three-dimensional spatial organization—that is both ITRs have mutations that result in the same overall 3D shape. For example, one ITR (e.g., 5′ ITR) in a mod-ITR pair can be from one serotype, and the other ITR (e.g., 3′ ITR) can be from a different serotype, however, both can have the same corresponding mutation (e.g., if the 5′ITR has a deletion in the C region, the cognate modified 3′ITR from a different serotype has a deletion at the corresponding position in the C′ region), such that the modified ITR pair has the same symmetrical three-dimensional spatial organization. In such embodiments, each ITR in a modified ITR pair can be from different serotypes (e.g. AAV1, 2, 3, 4, 5, 6, 7, 8, 9, 10, 11, and 12) such as the combination of AAV2 and AAV6, with the modification in one ITR reflected in the corresponding position in the cognate ITR from a different serotype. In one embodiment, a substantially symmetrical modified ITR pair refers to a pair of modified ITRs (mod-ITRs) so long as the difference in nucleotide sequences between the ITRs does not affect the properties or overall shape and they have substantially the same shape in 3D space. As a non-limiting example, a mod-ITR that has at least 95%, 96%, 97%, 98% or 99% sequence identity to the canonical mod-ITR as determined by standard means well known in the art such as BLAST (Basic Local Alignment Search Tool), or BLASTN at default settings, and also has a symmetrical three-dimensional spatial organization such that their 3D structure is the same shape in geometric space. A substantially symmetrical mod-ITR pair has the same A, C-C′ and B-B′ loops in 3D space, e.g., if a modified ITR in a substantially symmetrical mod-ITR pair has a deletion of a C-C′ arm, then the cognate mod-ITR has the corresponding deletion of the C-C′ loop and also has a similar 3D structure of the remaining A and B-B′ loops in the same shape in geometric space of its cognate mod-ITR.

[0085] The term “flanking” refers to a relative position of one nucleic acid sequence with respect to another nucleic acid sequence. Generally, in the sequence ABC, B is flanked by A and C. The same is true for the arrangement A×B×C. Thus, a flanking sequence precedes or follows a flanked sequence but need not be contiguous with, or immediately adjacent to the flanked sequence. In one embodiment, the term flanking refers to terminal repeats at each end of the linear duplex ceDNA vector.

[0086] As used herein, the terms “treat,” “treating,” and/or “treatment” include abrogating, substantially inhibiting, slowing or reversing the progression of a condition, substantially ameliorating clinical symptoms of a condition, or substantially preventing the appearance of clinical symptoms of a condition, obtaining beneficial or desired clinical results. According to some embodiments, the condition is hemophilia A. Treating further refers to accomplishing one or more of the following: (a) reducing the severity of the disorder; (b) limiting development of symptoms characteristic of the disorder(s) being treated; (c) limiting worsening of symptoms characteristic of the disorder(s) being treated; (d) limiting recurrence of the disorder(s) in patients that have previously had the disorder(s); and (e) limiting recurrence of symptoms in patients that were previously asymptomatic for the disorder(s). Beneficial or desired clinical results, such as pharmacologic and/or physiologic effects include, but are not limited to, preventing the disease, disorder or condition from occurring in a subject that may be predisposed to the disease, disorder or condition but does not yet experience or exhibit symptoms of the disease (prophylactic treatment), alleviation of symptoms of the disease, disorder or condition, diminishment of extent of the disease, disorder or condition, stabilization (i.e., not worsening) of the disease, disorder or condition, preventing spread of the disease, disorder or condition, delaying or slowing of the disease, disorder or condition progression, amelioration or palliation of the disease, disorder or condition, and combinations thereof, as well as prolonging survival as compared to expected survival if not receiving treatment.

[0087] As used herein, the term “increase,” “enhance,” “raise” (and like terms) generally refers to the act of increasing, either directly or indirectly, a concentration, level, function, activity, or behavior relative to the natural, expected, or average, or relative to a control condition.

[0088] As used herein, the term “minimize”, “reduce”, “decrease,” and/or “inhibit” (and like terms) generally refers to the act of reducing, either directly or indirectly, a concentration, level, function, activity, or behavior relative to the natural, expected, or average, or relative to a control condition.

[0089] As used herein, the term “ceDNA genome” refers to an expression cassette that further incorporates at least one inverted terminal repeat region. A ceDNA genome may further comprise one or more spacer regions. In some embodiments the ceDNA genome is incorporated as an intermolecular duplex polynucleotide of DNA into a plasmid or viral genome.

[0090] As used herein, the term “ceDNA spacer region” refers to an intervening sequence that separates functional elements in the ceDNA vector or ceDNA genome. In some embodiments, ceDNA spacer regions keep two functional elements at a desired distance for optimal functionality. In some embodiments, ceDNA spacer regions provide or add to the genetic stability of the ceDNA genome within e.g., a plasmid or baculovirus. In some embodiments, ceDNA spacer regions facilitate ready genetic manipulation of the ceDNA genome by providing a convenient location for cloning sites and the like. For example, in certain aspects, an oligonucleotide “polylinker” containing several restriction endonuclease sites, or a non-open reading frame sequence designed to have no known protein (e.g., transcription factor) binding sites can be positioned in the ceDNA genome to separate the cis-acting factors, e.g., inserting a 6mer, 12mer, 18mer, 24mer, 48mer, 86mer, 176mer, etc. between the terminal resolution site and the upstream transcriptional regulatory element. Similarly, the spacer may be incorporated between the polyadenylation signal sequence and the 3′-terminal resolution site.

[0091] As used herein, the terms “Rep binding site, “Rep binding element, “RBE” and “RBS” are used interchangeably and refer to a binding site for Rep protein (e.g., AAV Rep 78 or AAV Rep 68) which upon binding by a Rep protein permits the Rep protein to perform its site-specific endonuclease activity on the sequence incorporating the RBS. An RBS sequence and its inverse complement together form a single RBS. RBS sequences are known in the art, and include, for example, 5′-GCGCGCTCGCTCGCTC-3′ (SEQ ID NO: 60), an RBS sequence identified in AAV2. Any known RBS sequence may be used in the embodiments of the invention, including other known AAV RBS sequences and other naturally known or synthetic RBS sequences. Without being bound by theory it is thought that he nuclease domain of a Rep protein binds to the duplex nucleotide sequence GCTC, and thus the two known AAV Rep proteins bind directly to and stably assemble on the duplex oligonucleotide, 5′-(GCGC)(GCTC)(GCTC)(GCTC)-3′ (SEQ ID NO: 60). In addition, soluble aggregated conformers (i.e., undefined number of inter-associated Rep proteins) dissociate and bind to oligonucleotides that contain Rep binding sites. Each Rep protein interacts with both the nitrogenous bases and phosphodiester backbone on each strand. The interactions with the nitrogenous bases provide sequence specificity whereas the interactions with the phosphodiester backbone are non- or less-sequence specific and stabilize the protein-DNA complex.

[0092] As used herein, the terms “terminal resolution site” and “TRS” are used interchangeably herein and refer to a region at which Rep forms a tyrosine-phosphodiester bond with the 5′ thymidine generating a 3′ OH that serves as a substrate for DNA extension via a cellular DNA polymerase, e.g., DNA pol delta or DNA pol epsilon. Alternatively, the Rep-thymidine complex may participate in a coordinated ligation reaction. In some embodiments, a TRS minimally encompasses a non-base-paired thymidine. In some embodiments, the nicking efficiency of the TRS can be controlled at least in part by its distance within the same molecule from the RBS. When the acceptor substrate is the complementary ITR, then the resulting product is an intramolecular duplex. TRS sequences are known in the art, and include, for example, 5′-GGTTGA-3′ (SEQ ID NO: 61), the hexanucleotide sequence identified in AAV2. Any known TRS sequence may be used in the embodiments of the invention, including other known AAV TRS sequences and other naturally known or synthetic TRS sequences such as AGTT (SEQ ID NO: 62), GGTTGG (SEQ ID NO: 63), AGTTGG (SEQ ID NO: 64), AGTTGA (SEQ ID NO: 65), and other motifs such as RRTTRR (SEQ ID NO: 66).

[0093] As used herein, the term “ceDNA-plasmid” refers to a plasmid that comprises a ceDNA genome as an intermolecular duplex.

[0094] As used herein, the term “ceDNA-bacmid” refers to an infectious baculovirus genome comprising a ceDNA genome as an intermolecular duplex that is capable of propagating in E. coli as a plasmid, and so can operate as a shuttle vector for baculovirus.

[0095] As used herein, the term “ceDNA-baculovirus” refers to a baculovirus that comprises a ceDNA genome as an intermolecular duplex within the baculovirus genome.

[0096] As used herein, the terms “ceDNA-baculovirus infected insect cell” and “ceDNA-BIIC” are used interchangeably, and refer to an invertebrate host cell (including, but not limited to an insect cell (e.g., an Sf9 cell)) infected with a ceDNA-baculovirus.

[0097] As used herein, the term “ceDNA” refers to capsid-free closed-ended linear double stranded (ds) duplex DNA for non-viral gene transfer, synthetic or otherwise. Detailed description of ceDNA is described in International application of PCT/US2017/020828, filed Mar. 3, 2017, the entire contents of which are expressly incorporated herein by reference. Certain methods for the production of ceDNA comprising various inverted terminal repeat (ITR) sequences and configurations using cell-based methods are described in Example 1 of International applications PCT/US18/49996, filed Sep. 7, 2018, and PCT/US2018/064242, filed Dec. 6, 2018 each of which is incorporated herein in its entirety by reference. Certain methods for the production of synthetic ceDNA vectors comprising various ITR sequences and configurations are described, e.g., in International application PCT/US2019/14122, filed Jan. 18, 2019, the entire content of which is incorporated herein by reference.

[0098] As used herein, the term “closed-ended DNA vector” refers to a capsid-free DNA vector with at least one covalently closed end and where at least part of the vector has an intramolecular duplex structure.

[0099] As used herein, the terms “ceDNA vector” and “ceDNA” are used interchangeably and refer to a closed-ended DNA vector comprising at least one terminal palindrome. In some embodiments, the ceDNA comprises two covalently-closed ends.

[0100] As used herein, the term “neDNA” or “nicked ceDNA” refers to a closed-ended DNA having a nick or a gap of 1-100 base pairs in a stem region or spacer region 5′ upstream of an open reading frame (e.g., a promoter and transgene to be expressed).

[0101] As used herein, the terms “gap” and “nick” are used interchangeably and refer to a discontinued portion of synthetic DNA vector of the present invention, creating a stretch of single stranded DNA portion in otherwise double stranded ceDNA. The gap can be 1 base-pair to 100 base-pair long in length in one strand of a duplex DNA. Typical gaps, designed and created by the methods described herein and synthetic vectors generated by the methods can be, for example, 1, 2, 3, 4, 5, 6, 7, 8, 9, 10, 11, 12, 13, 14, 15, 16, 17, 18, 19, 20, 21, 22, 23, 24, 25, 26, 27, 28, 29, 30, 31, 32, 33, 34, 35, 36, 37, 38, 39, 40, 41, 42, 43, 44, 45, 46, 47, 48, 49, 50, 51, 52, 53, 54, 55, 56, 57, 58, 59 or 60 bp long in length. Exemplified gaps in the present disclosure can be 1 bp to 10 bp long, 1 to 20 bp long, 1 to 30 bp long in length.

[0102] As defined herein, “reporters” refer to proteins that can be used to provide detectable read-outs. Reporters generally produce a measurable signal such as fluorescence, color, or luminescence. Reporter protein coding sequences encode proteins whose presence in the cell or organism is readily observed. For example, fluorescent proteins cause a cell to fluoresce when excited with light of a particular wavelength, luciferases cause a cell to catalyze a reaction that produces light, and enzymes such as β-galactosidase convert a substrate to a colored product. Exemplary reporter polypeptides useful for experimental or diagnostic purposes include, but are not limited to β-lactamase, β-galactosidase (LacZ), alkaline phosphatase (AP), thymidine kinase (TK), green fluorescent protein (GFP) and other fluorescent proteins, chloramphenicol acetyltransferase (CAT), luciferase, and others well known in the art.

[0103] As used herein, the terms “sense” and “antisense” refer to the orientation of the structural element on the polynucleotide. The sense and antisense versions of an element are the reverse complement of each other.

[0104] As used herein, the term “synthetic AAV vector” and “synthetic production of AAV vector” refers to an AAV vector and synthetic production methods thereof in an entirely cell-free environment.

[0105] As used herein, “reporters” refer to proteins that can be used to provide detectable read-outs. Reporters generally produce a measurable signal such as fluorescence, color, or luminescence. Reporter protein coding sequences encode proteins whose presence in the cell or organism is readily observed. For example, fluorescent proteins cause a cell to fluoresce when excited with light of a particular wavelength, luciferases cause a cell to catalyze a reaction that produces light, and enzymes such as β-galactosidase convert a substrate to a colored product. Exemplary reporter polypeptides useful for experimental or diagnostic purposes include, but are not limited to β-lactamase, β-galactosidase (LacZ), alkaline phosphatase (AP), thymidine kinase (TK), green fluorescent protein (GFP) and other fluorescent proteins, chloramphenicol acetyltransferase (CAT), luciferase, and others well known in the art.

[0106] As used herein, the term “effector protein” refers to a polypeptide that provides a detectable read-out, either as, for example, a reporter polypeptide, or more appropriately, as a polypeptide that kills a cell, e.g., a toxin, or an agent that renders a cell susceptible to killing with a chosen agent or lack thereof. Effector proteins include any protein or peptide that directly targets or damages the host cell's DNA and/or RNA. For example, effector proteins can include, but are not limited to, a restriction endonuclease that targets a host cell DNA sequence (whether genomic or on an extrachromosomal element), a protease that degrades a polypeptide target necessary for cell survival, a DNA gyrase inhibitor, and a ribonuclease-type toxin. In some embodiments, the expression of an effector protein controlled by a synthetic biological circuit as described herein can participate as a factor in another synthetic biological circuit to thereby expand the range and complexity of a biological circuit system's responsiveness.

[0107] Transcriptional regulators refer to transcriptional activators and repressors that either activate or repress transcription of a gene of interest, such as FVIII. Promoters are regions of nucleic acid that initiate transcription of a particular gene Transcriptional activators typically bind nearby to transcriptional promoters and recruit RNA polymerase to directly initiate transcription. Repressors bind to transcriptional promoters and sterically hinder transcriptional initiation by RNA polymerase. Other transcriptional regulators may serve as either an activator or a repressor depending on where they bind and cellular and environmental conditions. Non-limiting examples of transcriptional regulator classes include, but are not limited to homeodomain proteins, zinc-finger proteins, winged-helix (forkhead) proteins, and leucine-zipper proteins.

[0108] As used herein, a “repressor protein” or “inducer protein” is a protein that binds to a regulatory sequence element and represses or activates, respectively, the transcription of sequences operatively linked to the regulatory sequence element. Preferred repressor and inducer proteins as described herein are sensitive to the presence or absence of at least one input agent or environmental input. Preferred proteins as described herein are modular in form, comprising, for example, separable DNA-binding and input agent-binding or responsive elements or domains.

[0109] As used herein, “carrier” includes any and all solvents, dispersion media, vehicles, coatings, diluents, antibacterial and antifungal agents, isotonic and absorption delaying agents, buffers, carrier solutions, suspensions, colloids, and the like. The use of such media and agents for pharmaceutically active substances is well known in the art. Supplementary active ingredients can also be incorporated into the compositions. The phrase “pharmaceutically-acceptable” refers to molecular entities and compositions that do not produce a toxic, an allergic, or similar untoward reaction when administered to a host.

[0110] As used herein, an “input agent responsive domain” is a domain of a transcription factor that binds to or otherwise responds to a condition or input agent in a manner that renders a linked DNA binding fusion domain responsive to the presence of that condition or input. In one embodiment, the presence of the condition or input results in a conformational change in the input agent responsive domain, or in a protein to which it is fused, that modifies the transcription-modulating activity of the transcription factor.

[0111] The term “in vivo” refers to assays or processes that occur in or within an organism, such as a multicellular animal. In some of the aspects described herein, a method or use can be said to occur “in vivo” when a unicellular organism, such as a bacterium, is used. The term “ex vivo” refers to methods and uses that are performed using a living cell with an intact membrane that is outside of the body of a multicellular animal or plant, e.g., explants, cultured cells, including primary cells and cell lines, transformed cell lines, and extracted tissue or cells, including blood cells, among others. The term “in vitro” refers to assays and methods that do not require the presence of a cell with an intact membrane, such as cellular extracts, and can refer to the introducing of a programmable synthetic biological circuit in a non-cellular system, such as a medium not comprising cells or cellular systems, such as cellular extracts.

[0112] The term “promoter,” as used herein, refers to any nucleic acid sequence that regulates the expression of another nucleic acid sequence by driving transcription of the nucleic acid sequence, which can be a heterologous target gene encoding a protein or an RNA. Promoters can be constitutive, inducible, repressible, tissue-specific, or any combination thereof. A promoter is a control region of a nucleic acid sequence at which initiation and rate of transcription of the remainder of a nucleic acid sequence are controlled. A promoter can also contain genetic elements at which regulatory proteins and molecules can bind, such as RNA polymerase and other transcription factors. In some embodiments of the aspects described herein, a promoter can drive the expression of a transcription factor that regulates the expression of the promoter itself. Within the promoter sequence will be found a transcription initiation site, as well as protein binding domains responsible for the binding of RNA polymerase. Eukaryotic promoters will often, but not always, contain “TATA” boxes and “CAT” boxes. Various promoters, including inducible promoters, may be used to drive the expression of transgenes in the ceDNA vectors disclosed herein. A promoter sequence may be bounded at its 3′ terminus by the transcription initiation site and extends upstream (5′ direction) to include the minimum number of bases or elements necessary to initiate transcription at levels detectable above background.

[0113] The term “enhancer” as used herein refers to a cis-acting regulatory sequence (e.g., 50-1,500 base pairs) that binds one or more proteins (e.g., activator proteins, or transcription factor) to increase transcriptional activation of a nucleic acid sequence. Enhancers can be positioned up to 1,000,000 base pars upstream of the gene start site or downstream of the gene start site that they regulate. An enhancer can be positioned within an intronic region, or in the exonic region of an unrelated gene.

[0114] A promoter can be said to drive expression or drive transcription of the nucleic acid sequence that it regulates. The phrases “operably linked,” “operatively positioned,” “operatively linked,” “under control,” and “under transcriptional control” indicate that a promoter is in a correct functional location and/or orientation in relation to a nucleic acid sequence it regulates to control transcriptional initiation and/or expression of that sequence. An “inverted promoter,” as used herein, refers to a promoter in which the nucleic acid sequence is in the reverse orientation, such that what was the coding strand is now the non-coding strand, and vice versa. Inverted promoter sequences can be used in various embodiments to regulate the state of a switch. In addition, in various embodiments, a promoter can be used in conjunction with an enhancer.

[0115] A promoter can be one naturally associated with a gene or sequence, as can be obtained by isolating the 5′ non-coding sequences located upstream of the coding segment and/or exon of a given gene or sequence. Such a promoter can be referred to as “endogenous.” Similarly, in some embodiments, an enhancer can be one naturally associated with a nucleic acid sequence, located either downstream or upstream of that sequence.

[0116] In some embodiments, a coding nucleic acid segment is positioned under the control of a “recombinant promoter” or “heterologous promoter,” both of which refer to a promoter that is not normally associated with the encoded nucleic acid sequence it is operably linked to in its natural environment. A recombinant or heterologous enhancer refers to an enhancer not normally associated with a given nucleic acid sequence in its natural environment. Such promoters or enhancers can include promoters or enhancers of other genes; promoters or enhancers isolated from any other prokaryotic, viral, or eukaryotic cell; and synthetic promoters or enhancers that are not “naturally occurring,” i.e., comprise different elements of different transcriptional regulatory regions, and/or mutations that alter expression through methods of genetic engineering that are known in the art. In addition to producing nucleic acid sequences of promoters and enhancers synthetically, promoter sequences can be produced using recombinant cloning and/or nucleic acid amplification technology, including PCR, in connection with the synthetic biological circuits and modules disclosed herein (see, e.g., U.S. Pat. Nos. 4,683,202, 5,928,906, each incorporated herein by reference). Furthermore, it is contemplated that control sequences that direct transcription and/or expression of sequences within non-nuclear organelles such as mitochondria, chloroplasts, and the like, can be employed as well.

[0117] As described herein, an “inducible promoter” is one that is characterized by initiating or enhancing transcriptional activity when in the presence of, influenced by, or contacted by an inducer or inducing agent. An “inducer” or “inducing agent,” as defined herein, can be endogenous, or a normally exogenous compound or protein that is administered in such a way as to be active in inducing transcriptional activity from the inducible promoter. In some embodiments, the inducer or inducing agent, i.e., a chemical, a compound or a protein, can itself be the result of transcription or expression of a nucleic acid sequence (i.e., an inducer can be an inducer protein expressed by another component or module), which itself can be under the control or an inducible promoter. In some embodiments, an inducible promoter is induced in the absence of certain agents, such as a repressor. Examples of inducible promoters include but are not limited to, tetracycline, metallothionine, ecdysone, mammalian viruses (e.g., the adenovirus late promoter; and the mouse mammary tumor virus long terminal repeat (MMTV-LTR)) and other steroid-responsive promoters, rapamycin responsive promoters and the like.

[0118] The terms “DNA regulatory sequences,” “control elements,” and “regulatory elements,” used interchangeably herein, refer to transcriptional and translational control sequences, such as promoters, enhancers, polyadenylation signals, terminators, protein degradation signals, and the like, that provide for and/or regulate transcription of a non-coding sequence (e.g., DNA-targeting RNA) or a coding sequence (e.g., site-directed modifying polypeptide, or Cas9/Csn1 polypeptide) and/or regulate translation of an encoded polypeptide.

[0119] “Operably linked” refers to a juxtaposition wherein the components so described are in a relationship permitting them to function in their intended manner. For instance, a promoter is operably linked to a coding sequence if the promoter affects its transcription or expression. An “expression cassette” includes a heterologous DNA sequence that is operably linked to a promoter or other regulatory sequence sufficient to direct transcription of the transgene in the ceDNA vector. Suitable promoters include, for example, tissue specific promoters. Promoters can also be of AAV origin.

[0120] The term “subject” as used herein refers to a human or animal, to whom treatment, including prophylactic treatment, with the ceDNA vector according to the present invention, is provided. Usually the animal is a vertebrate such as, but not limited to a primate, rodent, domestic animal or game animal. Primates include but are not limited to, chimpanzees, cynomolgous monkeys, spider monkeys, and macaques, e.g., Rhesus. Rodents include mice, rats, woodchucks, ferrets, rabbits and hamsters. Domestic and game animals include, but are not limited to, cows, horses, pigs, deer, bison, buffalo, feline species, e.g., domestic cat, canine species, e.g., dog, fox, wolf, avian species, e.g., chicken, emu, ostrich, and fish, e.g., trout, catfish and salmon. In certain embodiments of the aspects described herein, the subject is a mammal, e.g., a primate or a human. A subject can be male or female. Additionally, a subject can be an infant or a child. In some embodiments, the subject can be a neonate or an unborn subject, e.g., the subject is in utero. Preferably, the subject is a mammal. The mammal can be a human, non-human primate, mouse, rat, dog, cat, horse, or cow, but is not limited to these examples. Mammals other than humans can be advantageously used as subjects that represent animal models of diseases and disorders. In addition, the methods and compositions described herein can be used for domesticated animals and/or pets. A human subject can be of any age, gender, race or ethnic group, e.g., Caucasian (white), Asian, African, black, African American, African European, Hispanic, Mideastern, etc. In some embodiments, the subject can be a patient or other subject in a clinical setting. In some embodiments, the subject is already undergoing treatment. In some embodiments, the subject is an embryo, a fetus, neonate, infant, child, adolescent, or adult. In some embodiments, the subject is a human fetus, human neonate, human infant, human child, human adolescent, or human adult. In some embodiments, the subject is an animal embryo, or non-human embryo or non-human primate embryo. In some embodiments, the subject is a human embryo.

[0121] As used herein, the term “host cell”, includes any cell type that is susceptible to transformation, transfection, transduction, and the like with a nucleic acid construct or ceDNA expression vector of the present disclosure. As non-limiting examples, a host cell can be an isolated primary cell, pluripotent stem cells, CD34⁺ cells), induced pluripotent stem cells, or any of a number of immortalized cell lines (e.g., HepG2 cells). Alternatively, a host cell can be an in situ or in vivo cell in a tissue, organ or organism.

[0122] The term “exogenous” refers to a substance present in a cell other than its native source. The term “exogenous” when used herein can refer to a nucleic acid (e.g., a nucleic acid encoding a polypeptide) or a polypeptide that has been introduced by a process involving the hand of man into a biological system such as a cell or organism in which it is not normally found and one wishes to introduce the nucleic acid or polypeptide into such a cell or organism. Alternatively, “exogenous” can refer to a nucleic acid or a polypeptide that has been introduced by a process involving the hand of man into a biological system such as a cell or organism in which it is found in relatively low amounts and one wishes to increase the amount of the nucleic acid or polypeptide in the cell or organism, e.g., to create ectopic expression or levels. In contrast, the term “endogenous” refers to a substance that is native to the biological system or cell.

[0123] The term “sequence identity” refers to the relatedness between two nucleotide sequences. For purposes of the present disclosure, the degree of sequence identity between two deoxyribonucleotide sequences is determined using the Needleman-Wunsch algorithm (Needleman and Wunsch, 1970, supra) as implemented in the Needle program of the EMBOSS package (EMBOSS: The European Molecular Biology Open Software Suite, Rice et al., 2000, supra), preferably version 3.0.0 or later. The optional parameters used are gap open penalty of 10, gap extension penalty of 0.5, and the EDNAFULL (EMBOSS version of NCBI NUC4.4) substitution matrix. The output of Needle labeled “longest identity” (obtained using the -nobrief option) is used as the percent identity and is calculated as follows: (Identical Deoxyribonucleotides.times.100)/(Length of Alignment−Total Number of Gaps in Alignment). The length of the alignment is preferably at least 10 nucleotides, preferably at least 25 nucleotides more preferred at least 50 nucleotides and most preferred at least 100 nucleotides.

[0124] The term “homology” or “homologous” as used herein is defined as the percentage of nucleotide residues that are identical to the nucleotide residues in the corresponding sequence on the target chromosome, after aligning the sequences and introducing gaps, if necessary, to achieve the maximum percent sequence identity. Alignment for purposes of determining percent nucleotide sequence homology can be achieved in various ways that are within the skill in the art, for instance, using publicly available computer software such as BLAST, BLAST-2, ALIGN, ClustalW2 or Megalign (DNASTAR) software. Those skilled in the art can determine appropriate parameters for aligning sequences, including any algorithms needed to achieve maximal alignment over the full length of the sequences being compared. In some embodiments, a nucleic acid sequence (e.g., DNA sequence), for example of a homology arm, is considered “homologous” when the sequence is at least 70%, at least 75%, at least 80%, at least 85%, at least 90%, at least 91%, at least 92%, at least 93%, at least 94%, at least 95%, at least 96%, at least 97%, at least 98%, at least 99%, or more, identical to the corresponding native or unedited nucleic acid sequence (e.g., genomic sequence) of the host cell.

[0125] The term “heterologous,” as used herein, means a nucleotide or polypeptide sequence that is not found in the native nucleic acid or protein, respectively. A heterologous nucleic acid sequence may be linked to a naturally-occurring nucleic acid sequence (or a variant thereof) (e.g., by genetic engineering) to generate a chimeric nucleotide sequence encoding a chimeric polypeptide. A heterologous nucleic acid sequence may be linked to a variant polypeptide (e.g., by genetic engineering) to generate a nucleotide sequence encoding a fusion variant polypeptide.

[0126] A “vector” or “expression vector” is a replicon, such as plasmid, bacmid, phage, virus, virion, or cosmid, to which another DNA segment, i.e. an “insert”, may be attached so as to bring about the replication of the attached segment in a cell. A vector can be a nucleic acid construct designed for delivery to a host cell or for transfer between different host cells. As used herein, a vector can be viral or non-viral in origin and/or in final form, however for the purpose of the present disclosure, a “vector” generally refers to a ceDNA vector, as that term is used herein. The term “vector” encompasses any genetic element that is capable of replication when associated with the proper control elements and that can transfer gene sequences to cells. In some embodiments, a vector can be an expression vector or recombinant vector.

[0127] As used herein, the term “expression vector” refers to a vector that directs expression of an RNA or polypeptide from sequences linked to transcriptional regulatory sequences on the vector. The sequences expressed will often, but not necessarily, be heterologous to the cell. An expression vector may comprise additional elements, for example, the expression vector may have two replication systems, thus allowing it to be maintained in two organisms, for example in human cells for expression and in a prokaryotic host for cloning and amplification. The term “expression” refers to the cellular processes involved in producing RNA and proteins and as appropriate, secreting proteins, including where applicable, but not limited to, for example, transcription, transcript processing, translation and protein folding, modification and processing. “Expression products” include RNA transcribed from a gene, and polypeptides obtained by translation of mRNA transcribed from a gene. The term “gene” means the nucleic acid sequence which is transcribed (DNA) to RNA in vitro or in vivo when operably linked to appropriate regulatory sequences. The gene may or may not include regions preceding and following the coding region, e.g., 5′ untranslated (5′UTR) or “leader” sequences and 3′ UTR or “trailer” sequences, as well as intervening sequences (introns) between individual coding segments (exons).

[0128] By “recombinant vector” is meant a vector that includes a heterologous nucleic acid sequence, or “transgene” that is capable of expression in vivo. It should be understood that the vectors described herein can, in some embodiments, be combined with other suitable compositions and therapies. In some embodiments, the vector is episomal. The use of a suitable episomal vector provides a means of maintaining the nucleotide of interest in the subject in high copy number extra chromosomal DNA thereby eliminating potential effects of chromosomal integration.

[0129] The phrase “genetic disease” as used herein refers to a disease, partially or completely, directly or indirectly, caused by one or more abnormalities in the genome, especially a condition that is present from birth. The abnormality may be a mutation, an insertion or a deletion. The abnormality may affect the coding sequence of the gene or its regulatory sequence. The genetic disease may be, but not limited to DMD, hemophilia, cystic fibrosis, Huntington's chorea, familial hypercholesterolemia (LDL receptor defect), hepatoblastoma, Wilson's disease, congenital hepatic porphyria, inherited disorders of hepatic metabolism, Lesch Nyhan syndrome, sickle cell anemia, thalassemia, xeroderma pigmentosum, Fanconi's anemia, retinitis pigmentosa, ataxia telangiectasia, Bloom's syndrome, retinoblastoma, and Tay-Sachs disease.

[0130] An “inhibitory polynucleotide” as used herein refers to a DNA or RNA molecule that reduces or prevents expression (transcription or translation) of a second (target) polynucleotide. Inhibitory polynucleotides include antisense polynucleotides, ribozymes, and external guide sequences. The term “inhibitory polynucleotide” further includes DNA and RNA molecules, e.g., RNAi that encode the actual inhibitory species, such as DNA molecules that encode ribozymes.

[0131] As used herein, “gene silencing” or “gene silenced” in reference to an activity of an RNAi molecule, for example a siRNA or miRNA refers to a decrease in the mRNA level in a cell for a target gene.

[0132] As used herein, the term “RNAi” refers to any type of interfering RNA, including but not limited to, siRNA, shRNAi, endogenous microRNA and artificial microRNA. For instance, it includes sequences previously identified as siRNA, regardless of the mechanism of down-stream processing of the RNA (i.e. although siRNAs are believed to have a specific method of in vivo processing resulting in the cleavage of mRNA, such sequences can be incorporated into the vectors in the context of the flanking sequences described herein). The term “RNAi” can include both gene silencing RNAi molecules, and also RNAi effector molecules which activate the expression of a gene.

[0133] As used herein the term “comprising” or “comprises” is used in reference to compositions, methods, and respective component(s) thereof, that are essential to the method or composition, yet open to the inclusion of unspecified elements, whether essential or not.

[0134] As used herein the term “consisting essentially of” refers to those elements required for a given embodiment. The term permits the presence of elements that do not materially affect the basic and novel or functional characteristic(s) of that embodiment. The use of “comprising” indicates inclusion rather than limitation.

[0135] The term “consisting of” refers to compositions, methods, and respective components thereof as described herein, which are exclusive of any element not recited in that description of the embodiment.

[0136] As used herein the term “consisting essentially of” refers to those elements required for a given embodiment. The term permits the presence of additional elements that do not materially affect the basic and novel or functional characteristic(s) of that embodiment of the invention.

[0137] As used in this specification and the appended claims, the singular forms “a,” “an,” and “the” include plural references unless the context clearly dictates otherwise. Thus, for example, references to “the method” includes one or more methods, and/or steps of the type described herein and/or which will become apparent to those persons skilled in the art upon reading this disclosure and so forth. Similarly, the word “or” is intended to include “and” unless the context clearly indicates otherwise. Although methods and materials similar or equivalent to those described herein can be used in the practice or testing of this disclosure, suitable methods and materials are described below. The abbreviation, “e.g.” is derived from the Latin exempli gratia and is used herein to indicate a non-limiting example. Thus, the abbreviation “e.g.” is synonymous with the term “for example.”

[0138] Groupings of alternative elements or embodiments of the invention disclosed herein are not to be construed as limitations. Each group member can be referred to and claimed individually or in any combination with other members of the group or other elements found herein. One or more members of a group can be included in, or deleted from, a group for reasons of convenience and/or patentability. When any such inclusion or deletion occurs, the specification is herein deemed to contain the group as modified thus fulfilling the written description of all Markush groups used in the appended claims.

[0139] In some embodiments of any of the aspects, the disclosure described herein does not concern a process for cloning human beings, processes for modifying the germ line genetic identity of human beings, uses of human embryos for industrial or commercial purposes or processes for modifying the genetic identity of animals which are likely to cause them suffering without any substantial medical benefit to man or animal, and also animals resulting from such processes.

[0140] Other terms are defined herein within the description of the various aspects of the invention.

[0141] All patents and other publications; including literature references, issued patents, published patent applications, and co-pending patent applications; cited throughout this application are expressly incorporated herein by reference for the purpose of describing and disclosing, for example, the methodologies described in such publications that might be used in connection with the technology described herein. These publications are provided solely for their disclosure prior to the filing date of the present application. Nothing in this regard should be construed as an admission that the inventors are not entitled to antedate such disclosure by virtue of prior invention or for any other reason. All statements as to the date or representation as to the contents of these documents is based on the information available to the applicants and does not constitute any admission as to the correctness of the dates or contents of these documents.

[0142] The description of embodiments of the disclosure is not intended to be exhaustive or to limit the disclosure to the precise form disclosed. While specific embodiments of, and examples for, the disclosure are described herein for illustrative purposes, various equivalent modifications are possible within the scope of the disclosure, as those skilled in the relevant art will recognize. For example, while method steps or functions are presented in a given order, alternative embodiments may perform functions in a different order, or functions may be performed substantially concurrently. The teachings of the disclosure provided herein can be applied to other procedures or methods as appropriate. The various embodiments described herein can be combined to provide further embodiments. Aspects of the disclosure can be modified, if necessary, to employ the compositions, functions and concepts of the above references and application to provide yet further embodiments of the disclosure. Moreover, due to biological functional equivalency considerations, some changes can be made in protein structure without affecting the biological or chemical action in kind or amount. These and other changes can be made to the disclosure in light of the detailed description. All such modifications are intended to be included within the scope of the appended claims.

[0143] Specific elements of any of the foregoing embodiments can be combined or substituted for elements in other embodiments. Furthermore, while advantages associated with certain embodiments of the disclosure have been described in the context of these embodiments, other embodiments may also exhibit such advantages, and not all embodiments need necessarily exhibit such advantages to fall within the scope of the disclosure.

[0144] The technology described herein is further illustrated by the following examples which in no way should be construed as being further limiting. It should be understood that this invention is not limited to the particular methodology, protocols, and reagents, etc., described herein and as such can vary. The terminology used herein is for the purpose of describing particular embodiments only and is not intended to limit the scope of the present invention, which is defined solely by the claims.

### II. Expression of a FVIII Protein from a ceDNA Vector

[0145] The technology described herein is directed in general to the expression and/or production of FVIII protein in a cell from a non-viral DNA vector, e.g., a ceDNA vector as described herein. ceDNA vectors for expression of FVIII protein are described herein in the section entitled “ceDNA vectors in general”. In particular, ceDNA vectors for expression of FVIII protein comprise a pair of ITRs (e.g., symmetric or asymmetric as described herein) and between the ITR pair, a nucleic acid encoding an FVIII protein, as described herein, operatively linked to a promoter or regulatory sequence. A distinct advantage of ceDNA vectors for expression of FVIII protein over traditional AAV vectors, and even lentiviral vectors, is that there is no size constraint for the heterologous nucleic acid sequences encoding a desired protein. Thus, even a full length 6.8 kb FVIII protein can be expressed from a single ceDNA vector. Thus, the ceDNA vectors described herein can be used to express a therapeutic FVIII protein in a subject in need thereof, e.g., a subject with hemophilia A.

[0146] As one will appreciate, the ceDNA vector technologies described herein can be adapted to any level of complexity or can be used in a modular fashion, where expression of different components of a FVIII protein can be controlled in an independent manner. For example, it is specifically contemplated that the ceDNA vector technologies designed herein can be as simple as using a single ceDNA vector to express a single heterologous gene sequence (e.g., a FVIII protein) or can be as complex as using multiple ceDNA vectors, where each vector expresses multiple FVIII proteins or associated co-factors or accessory proteins that are each independently controlled by different promoters. The following embodiments are specifically contemplated herein and can adapted by one of skill in the art as desired.

[0147] In one embodiment, a single ceDNA vector can be used to express a single component of an FVIII protein. Alternatively, a single ceDNA vector can be used to express multiple components (e.g., at least 2) of a FVIII protein under the control of a single promoter (e.g., a strong promoter), optionally using an IRES sequence(s) to ensure appropriate expression of each of the components, e.g., co-factors or accessory proteins.

[0148] Also contemplated herein, in another embodiment, is a single ceDNA vector comprising at least two inserts (e.g., expressing a heavy chain or light chain), where the expression of each insert is under the control of its own promoter. The promoters can include multiple copies of the same promoter, multiple different promoters, or any combination thereof. As one of skill in the art will appreciate, it is often desirable to express components of a FVIII protein at different expression levels, thus controlling the stoichiometry of the individual components expressed to ensure efficient a FVIII protein folding and combination in the cell.

[0149] Additional variations of ceDNA vector technologies can be envisioned by one of skill in the art or can be adapted from protein production methods using conventional vectors.

### A. Nucleic Acids

[0150] The characterization and development of nucleic acid molecules for potential therapeutic use are provided herein. According to some embodiments, the nucleic acids for therapeutic use encode a FVIII protein. In some embodiments, chemical modification of oligonucleotides for the purpose of altered and improved in vivo properties (delivery, stability, lifetime, folding, target specificity), as well as their biological function and mechanism that directly correlate with therapeutic application, are described where appropriate.

[0151] Illustrative therapeutic nucleic acids of the present disclosure that can be immunostimulatory and require use of immunosuppressants disclosed herein can include, but are not limited to, minigenes, plasmids, minicircles, small interfering RNA (siRNA), microRNA (miRNA), antisense oligonucleotides (ASO), ribozymes, closed ended double stranded DNA (e.g., ceDNA, CELiD, linear covalently closed DNA (“ministring”), doggybone (dbDNA™), protelomere closed ended DNA, or dumbbell linear DNA), dicer-substrate dsRNA, small hairpin RNA (shRNA), asymmetrical interfering RNA (aiRNA), microRNA (miRNA), mRNA, tRNA, rRNA, and DNA viral vectors, viral RNA vector, and any combination thereof.

[0152] siRNA or miRNA that can downregulate the intracellular levels of specific proteins through a process called RNA interference (RNAi) are also contemplated by the present invention to be nucleic acid therapeutics. After siRNA or miRNA is introduced into the cytoplasm of a host cell, these double-stranded RNA constructs can bind to a protein called RISC. The sense strand of the siRNA or miRNA is removed by the RISC complex. The RISC complex, when combined with the complementary mRNA, cleaves the mRNA and release the cut strands. RNAi is by inducing specific destruction of mRNA that results in downregulation of a corresponding protein.

[0153] Antisense oligonucleotides (ASO) and ribozymes that inhibit mRNA translation into protein can be nucleic acid therapeutics. For antisense constructs, these single stranded deoxy nucleic acids have a complementary sequence to the sequence of the target protein mRNA, and Watson—capable of binding to the mRNA by Crick base pairing. This binding prevents translation of a target mRNA, and/or triggers RNaseH degradation of the mRNA transcript. As a result, the antisense oligonucleotide has increased specificity of action (i.e., down-regulation of a specific disease-related protein).

[0154] In any of the methods provided herein, the therapeutic nucleic acid can be a therapeutic RNA. The therapeutic RNA can be an inhibitor of mRNA translation, agent of RNA interference (RNAi), catalytically active RNA molecule (ribozyme), transfer RNA (tRNA) or an RNA that binds an mRNA transcript (ASO), protein or other molecular ligand (aptamer). In any of the methods provided herein, the agent of RNAi can be a double-stranded RNA, single-stranded RNA, micro RNA, short interfering RNA, short hairpin RNA, or a triplex-forming oligonucleotide.

[0155] According to some embodiments, the therapeutic nucleic acid is a closed ended double stranded DNA, e.g., a ceDNA. According to some embodiments, the expression and/or production of a therapeutic protein in a cell is from a non-viral DNA vector, e.g., a ceDNA vector. A distinct advantage of ceDNA vectors for expression of a therapeutic protein over traditional AAV vectors, and even lentiviral vectors, is that there is no size constraint for the heterologous nucleic acid sequences encoding a desired protein. Thus, even a large therapeutic protein can be expressed from a single ceDNA vector. Thus, ceDNA vectors can be used to express a therapeutic protein in a subject in need thereof.

[0156] In general, a ceDNA vector for expression of a therapeutic protein as disclosed herein, comprises in the 5′ to 3′ direction: a first adeno-associated virus (AAV) inverted terminal repeat (ITR), a nucleotide sequence of interest (for example an expression cassette as described herein) and a second AAV ITR. The ITR sequences selected from any of: (i) at least one WT ITR and at least one modified AAV inverted terminal repeat (mod-ITR) (e.g., asymmetric modified ITRs); (ii) two modified ITRs where the mod-ITR pair have a different three-dimensional spatial organization with respect to each other (e.g., asymmetric modified ITRs), or (iii) symmetrical or substantially symmetrical WT-WT ITR pair, where each WT-ITR has the same three-dimensional spatial organization, or (iv) symmetrical or substantially symmetrical modified ITR pair, where each mod-ITR has the same three-dimensional spatial organization.

[0157] In some embodiments, a transgene encoding the FVIII protein can also encode a secretory sequence so that the a FVIII protein is directed to the Golgi Apparatus and Endoplasmic Reticulum whence a FVIII protein will be folded into the correct conformation by chaperone molecules as it passes through the ER and out of the cell. Exemplary secretory sequences include, but are not limited to VH-02 (SEQ ID NO: 88) and VK-A26 (SEQ ID NO: 89) and Igκ signal sequence (SEQ ID NO: 126), as well as a Glue secretory signal that allows the tagged protein to be secreted out of the cytosol (SEQ ID NO: 188), TMD-ST secretory sequence, that directs the tagged protein to the Golgi (SEQ ID NO: 189).

[0158] Regulatory switches can also be used to fine tune the expression of the FVIII protein so that the FVIII protein is expressed as desired, including but not limited to expression of the FVIII protein at a desired expression level or amount, or alternatively, when there is the presence or absence of particular signal, including a cellular signaling event. For instance, as described herein, expression of the FVIII protein from the ceDNA vector can be turned on or turned off when a particular condition occurs, as described herein in the section entitled Regulatory Switches.

[0159] For example, and for illustration purposes only, FVIII proteins can be used to turn off undesired reaction, such as too high a level of production of the FVIII protein. The FVIII gene can contain a signal peptide marker to bring the FVIII protein to the desired cell. However, in either situation it can be desirable to regulate the expression of the FVIII protein. ceDNA vectors readily accommodate the use of regulatory switches.

[0160] A distinct advantage of ceDNA vectors over traditional AAV vectors, and even lentiviral vectors, is that there is no size constraint for the heterologous nucleic acid sequences encoding the FVIII protein. Thus, even a full length FVIII, as well as optionally any co-factors or assessor proteins can be expressed from a single ceDNA vector. In addition, depending on the necessary stoichiometry one can express multiple segments of the same FVIII protein, and can use same or different promoters, and can also use regulatory switches to fine tune expression of each region. For example, as shown in the Examples, a ceDNA vector that comprises a dual promoter system can be used, so that a different promoter is used for each domain of the FVIII protein. Use of a ceDNA plasmid to produce the FVIII protein can include a unique combination of promoters for expression of the domains of the FVIII protein that results in the proper ratios of each domain for the formation of functional FVIII protein. Accordingly, in some embodiments, a ceDNA vector can be used to express different regions of FVIII protein separately (e.g., under control of a different promoter).

[0161] In another embodiment, the FVIII protein expressed from the ceDNA vectors further comprises an additional functionality, such as fluorescence, enzyme activity, secretion signal or immune cell activator.

[0162] In some embodiments, the ceDNA encoding the FVIII protein can further comprise a linker domain, for example. As used herein “linker domain” refers to an oligo- or polypeptide region from about 2 to 100 amino acids in length, which links together any of the domains/regions of the a FVIII protein as described herein. In some embodiment, linkers can include or be composed of flexible residues such as glycine and serine so that the adjacent protein domains are free to move relative to one another. Longer linkers may be used when it is desirable to ensure that two adjacent domains do not sterically interfere with one another. Linkers may be cleavable or non-cleavable. Examples of cleavable linkers include 2A linkers (for example T2A), 2A-like linkers or functional equivalents thereof and combinations thereof. The linker can be a linker region is T2A derived from Thosea asigna virus.

[0163] It is well within the abilities of one of skill in the art to take a known and/or publicly available protein sequence of e.g., the FVIII etc., and reverse engineer a cDNA sequence to encode such a protein. The cDNA can then be codon optimized to match the intended host cell and inserted into a ceDNA vector as described herein.

B. ceDNA Vectors Expressing FVIII Protein

[0164] A ceDNA vector for expression of FVIII protein having one or more sequences encoding a desired FVIII can comprise regulatory sequences such as promoters, secretion signals, polyA regions, and enhancers. At a minimum, a ceDNA vector comprises one or more heterologous sequences encoding a FVIII protein.

[0165] In order to achieve highly efficient and accurate FVIII protein assembly, it is specifically contemplated in some embodiments that the FVIII protein comprise an endoplasmic reticulum ER leader sequence to direct it to the ER, where protein folding occurs. For example, a sequence that directs the expressed protein(s) to the ER for folding.

[0166] In some embodiments, a cellular or extracellular localization signal (e.g., secretory signal, nuclear localization signal, mitochondrial localization signal etc.) is comprised in the ceDNA vector to direct the secretion or desired subcellular localization of FVIII such that the FVIII protein can bind to intracellular target(s) (e.g., an intrabody) or extracellular target(s).

[0167] In some embodiments, a ceDNA vector for expression of FVIII protein as described herein permits the assembly and expression of any desired FVIII protein in a modular fashion. As used herein, the term “modular” refers to elements in a ceDNA expressing plasmid that can be readily removed from the construct. For example, modular elements in a ceDNA-generating plasmid comprise unique pairs of restriction sites flanking each element within the construct, enabling the exclusive manipulation of individual elements (see e.g., FIGS. 1A-1G). Thus, the ceDNA vector platform can permit the expression and assembly of any desired FVIII protein configuration. Provided herein in various embodiments are ceDNA plasmid vectors that can reduce and/or minimize the amount of manipulation required to assemble a desired ceDNA vector encoding FVIII protein.

C. Exemplary FVIII Proteins Expressed by ceDNA Vectors

[0168] In particular, a ceDNA vector for expression of FVIII protein as disclosed herein can encode, for example, but is not limited to, FVIII proteins, as well as variants, and/or active fragments thereof, for use in the treatment, prophylaxis, and/or amelioration of one or more symptoms of hemophilia A. In one aspect, the hemophilia A is a human hemophilia A.

### (i) FVIII Therapeutic Proteins and Fragments Thereof

[0169] Essentially any version of the FVIII therapeutic protein or fragment thereof (e.g., functional fragment) can be encoded by and expressed in and from a ceDNA vector as described herein. One of skill in the art will understand that FVIII therapeutic protein includes all splice variants and orthologs of the FVIII protein. FVIII therapeutic protein includes intact molecules as well as fragments (e.g., functional) thereof.

### Factor VIII

[0170] Factor VIII is the nonenzymatic cofactor to the activated clotting factor IX (FIXa), which, when proteolytically activated, interacts with FIXa to form a tight noncovalent complex that binds to and activates factor X (FX).

[0171] The Factor VIII gene or protein can also be referred to as F8, Coagulation Factor VIII, Procoagulant Component, Antihemophilic Factor, F8C, AHF, DXS1253E, FVIII, HEMA, or F8B. Expression of the Factor VIII gene is tissue-specific and is mostly observed in liver cells. The highest level of the mRNA and Factor VIII proteins has been detected in liver sinusoidal cells; significant amounts of Factor VIII are also present in hepatocytes and in Kupffer cells (resident macrophages of liver sinusoids). Moderate levels of Factor VIII protein are detectable in the serum and plasma. Low to moderate levels of Factor VIII protein are expressed in fetal brain, retina, kidney and testis.

[0172] Factor VIII mRNA is expressed throughout many tissues of the body, including bone marrow, whole blood, white blood cells, lymph nodes, thymus, brain, cerebral cortex, cerebellum, retina, spinal cord, tibial nerve, heart, artery, smooth muscle, skeletal muscle, small intestine, colon, adipocytes, kidney, liver, lung, spleen, stomach, esophagus, bladder, pancreas, thyroid, salivary gland, adrenal gland, pituitary gland, breast, skin, ovary, uterus, placenta, prostate, and testis. The FVIII gene localized on the long arm of the X chromosome occupies a region approximately 186 kbp long and consists of 26 exons (69-3,106 bp) and introns (from 207 bp to 32.4 kbp). The total length of the coding sequence of this gene is 9 kbp.

[0173] The mature factor VIII polypeptide comprises the A1-A2-B-A3-C1-C2 structural domains. Three acidic subdomains, which are denoted as a1-a3-A1(a1)-A2(a2)-B-(a3)A3-C1-C2, localize at the boundaries of A domains and play a significant role in the interaction between FVIII and other proteins (in particular, with thrombin). Mutations in these subdomains reduce the level of factor VIII activation by thrombin.

[0174] The factor VIII protein (Coagulation factor VIII isoform) is a preproprotein [Homo sapiens]; Accession number: NP_000123.1 (2351 aa) and has the following sequence:

(SEQ ID NO: 218)
MQIELSTCFFLCLLRFCFSATRRYYLGAVELSWDYMQSDLGELPVDARF
PPRVPKSFPFNTSVVYKKTLFVEFTDHLFNIAKPRPPWMGLLGPTIQAE
VYDTVVITLKNMASHPVSLHAVGVSYWKASEGAEYDDQTSQREKEDDKV
FPGGSHTYVWQVLKENGPMASDPLCLTYSYLSHVDLVKDLNSGLIGALL
VCREGSLAKEKTQTLHKFILLFAVFDEGKSWHSETKNSLMQDRDAASAR
AWPKMHTVNGYVNRSLPGLIGCHRKSVYWHVIGMGTTPEVHSIFLEGHT
FLVRNHRQASLEISPITFLTAQTLLMDLGQFLLFCHISSHQHDGMEAYV
KVDSCPEEPQLRMKNNEEAEDYDDDLTDSEMDVVRFDDDNSPSFIQIRS
VAKKHPKTWVHYIAAEEEDWDYAPLVLAPDDRSYKSQYLNNGPQRIGRK
YKKVRFMAYTDETFKTREAIQHESGILGPLLYGEVGDTLLIIFKNQASR
PYNIYPHGITDVRPLYSRRLPKGVKHLKDFPILPGEIFKYKWTVTVEDG
PTKSDPRCLTRYYSSFVNMERDLASGLIGPLLICYKESVDQRGNQIMSD
KRNVILFSVFDENRSWYLTENIQRFLPNPAGVQLEDPEFQASNIMHSIN
GYVFDSLQLSVCLHEVAYWYILSIGAQTDFLSVFFSGYTFKHKMVYEDT
LTLFPFSGETVFMSMENPGLWILGCHNSDFRNRGMTALLKVSSCDKNTG
DYYEDSYEDISAYLLSKNNAIEPRSFSQNSRHPSTRQKQFNATTIPEND
IEKTDPWFAHRTPMPKIQNVSSSDLLMLLRQSPTPHGLSLSDLQEAKYE
TFSDDPSPGAIDSNNSLSEMTHFRPQLHHSGDMVFTPESGLQLRLNEKL
GTTAATELKKLDFKVSSTSNNLISTIPSDNLAAGTDNTSSLGPPSMPVH
YDSQLDTTLFGKKSSPLTESGGPLSLSEENNDSKLLESGLMNSQESSWG
KNVSSTESGRLFKGKRAHGPALLTKDNALFKVSISLLKTNKTSNNSATN
RKTHIDGPSLLIENSPSVWQNILESDTEFKKVTPLIHDRMLMDKNATAL
RLNHMSNKTTSSKNMEMVQQKKEGPIPPDAQNPDMSFFKMLFLPESARW
IQRTHGKNSLNSGQGPSPKQLVSLGPEKSVEGQNFLSEKNKVVVGKGEF
TKDVGLKEMVFPSSRNLFLTNLDNLHENNTHNQEKKIQEEIEKKETLIQ
ENVVLPQIHTVTGTKNFMKNLFLLSTRQNVEGSYDGAYAPVLQDFRSLN
DSTNRTKKHTAHFSKKGEEENLEGLGNQTKQIVEKYACTTRISPNTSQQ
NFVTQRSKRALKQFRLPLEETELEKRIIVDDTSTQWSKNMKHLTPSTLT
QIDYNEKEKGAITQSPLSDCLTRSHSIPQANRSPLPIAKVSSFPSIRPI
YLTRVLFQDNSSHLPAASYRKKDSGVQESSHFLQGAKKNNLSLAILTLE
MTGDQREVGSLGTSATNSVTYKKVENTVLPKPDLPKTSGKVELLPKVHI
YQKDLFPTETSNGSPGHLDLVEGSLLQGTEGAIKWNEANRPGKVPFLRV
ATESSAKTPSKLLDPLAWDNHYGTQIPKEEWKSQEKSPEKTAFKKKDTI
LSLNACESNHAIAAINEGQNKPEIEVTWAKQGRTERLCSQNPPVLKRHQ
REITRTTLQSDQEEIDYDDTISVEMKKEDFDIYDEDENQSPRSFQKKTR
HYFIAAVERLWDYGMSSSPHVLRNRAQSGSVPQFKKVVFQEFTDGSFTQ
PLYRGELNEHLGLLGPYIRAEVEDNIMVTFRNQASRPYSFYSSLISYEE
DQRQGAEPRKNFVKPNETKTYFWKVQHHMAPTKDEFDCKAWAYFSDVDL
EKDVHSGLIGPLLVCHTNTLNPAHGRQVTVQEFALFFTIFDETKSWYFT
ENMERNCRAPCNIQMEDPTFKENYRFHAINGYIMDTLPGLVMAQDQRIR
WYLLSMGSNENIHSIHFSGHVFTVRKKEEYKMALYNLYPGVFETVEMLP
SKAGIWRVECLIGEHLHAGMSTLFLVYSNKCQTPLGMASGHIRDFQITA
SGQYGQWAPKLARLHYSGSINAWSTKEPFSWIKVDLLAPMIIHGIKTQG
ARQKFSSLYISQFIIMYSLDGKKWQTYRGNSTGTLMVFFGNVDSSGIKH
NIFNPPIIARYIRLHPTHYSIRSTLRMELMGCDLNSCSMPLGMESKAIS
DAQITASSYFTNMFATWSPSKARLHLQGRSNAWRPQVNNPKEWLQVDFQ
KTMKVTGVTTQGVKSLLTSMYVKEFLISSSQDGHQWTLFFQNGKVKVFQ
GNQDSFTPVVNSLDPPLLTRYLRIHPQSWVHQIALRMEVLGCEAQDLY

[0175] A distinct advantage of ceDNA vectors over traditional AAV vectors, and even lentiviral vectors, is that there is no size constraint for the heterologous nucleic acid sequences encoding a desired protein. Thus, multiple full length FVIII therapeutic proteins can be expressed from a single ceDNA vector.

[0176] Expression of FVIII therapeutic protein or fragment thereof from a ceDNA vector can be achieved both spatially and temporally using one or more inducible or repressible promoters, as known in the art or described herein, including regulatory switches as described herein.

[0177] In one embodiment, FVIII therapeutic protein is an “therapeutic protein variant,” which refers to the FVIII therapeutic protein having an altered amino acid sequence, composition or structure as compared to its corresponding native FVIII therapeutic protein. In one embodiment, FVIII is a functional version (e.g., wild type). It may also be useful to express a mutant version of FVIII protein such as a point mutation or deletion mutation that leads to hemophilia A, e.g., for an animal model of the disease and/or for assessing drugs for hemophilia A. Delivery of mutant or modified FVIII proteins to a cell or animal model system can be done in order to generate a disease model. Such a cellular or animal model can be used for research and/or drug screening. FVIII therapeutic protein expressed from the ceDNA vectors may further comprise a sequence/moiety that confers an additional functionality, such as fluorescence, enzyme activity, or secretion signal. In one embodiment, an FVIII therapeutic protein variant comprises a non-native tag sequence for identification (e.g., an immunotag) to allow it to be distinguished from endogenous FVIII therapeutic protein in a recipient host cell.

[0178] It is well within the abilities of one of skill in the art to take a known and/or publicly available protein sequence of e.g., FVIII therapeutic protein and reverse engineer a cDNA sequence to encode such a protein. The cDNA can then be codon optimized to match the intended host cell and inserted into a ceDNA vector as described herein.

[0179] In one embodiment, the FVIII therapeutic protein encoding sequence can be derived from an existing host cell or cell line, for example, by reverse transcribing mRNA obtained from the host and amplifying the sequence using PCR.

(ii) FVIII Therapeutic Protein Expressing ceDNA Vectors

[0180] A ceDNA vector having one or more sequences encoding a desired FVIII therapeutic protein can comprise regulatory sequences such as promoters, secretion signals, polyA regions, and enhancers. At a minimum, a ceDNA vector comprises one or more heterologous sequences encoding the FVIII therapeutic protein or functional fragment thereof. Exemplary cassette inserts for generating ceDNA vectors encoding the FVIII therapeutic proteins are depicted in FIGS. 1A-1G. In one embodiment, the ceDNA vector comprises an FVIII sequence listed in Table 1 herein.

TABLE 1
Exemplary FVIII sequences for treatment of hemophilia A
Exemplary nucleic acid sequences encoding Factor VIII

| | | | | SEQ | |
|---|---|---|---|---|---|
| | | Ref- | CG | ID | |
| Description | Length | erence | Content | NO: | Sequence |
| B domain-deleted | 4374 | https:// | 3 | 380 | ATGCAGATTGAGCTGAGCACCTGCTTCTTCCTGTGCCTGCTGAGGTTCTGCTTCTCTGCCACCAGGAGATACTACCTGGG |
| (BDD) hEVIII with | | www.ncbi. | | | GGCTGTGGAGCTGAGCTGGGACTACATGCAGTCTGACCTGGGGGAGCTGCCTGTGGATGCCAGGTTCCCCCCCAGAGT |
| SQ sequence I | | nlm.nih. | | | GCCCAAGAGCTTCCCCTTCAACACCTCTGTGGTGTACAAGAAGACCCTGTTTGTGGAGTTCACTGACCACCTGTTCAACA |
| | | gov/ | | | TTGCCAAGCCCAGGCCCCCCTGGATGGGCCTGCTGGGCCCCACCATCCAGGCTGAGGTGTATGACACTGTGGTGATCAC |
| | | pubmed/ | | | CCTGAAGAACATGGCCAGCCACCCTGTGAGCCTGCATGCTGTGGGGGTGAGCTACTGGAAGGCCTCTGAGGGGGCTGA |
| | | 29292164 | | | GTATGATGACCAGACCAGCCAGAGGGAGAAGGAGGATGACAAGGTGTTCCCTGGGGGCAGCCACACCTATGTGTGGC |
| | | | | | AGGTGCTGAAGGAGAATGGCCCCATGGCCTCTGACCCCCTGTGCCTGACCTACAGCTACCTGAGCCATGTGGACCTGGT |
| | | | | | GAAGGACCTGAACTCTGGCCTGATTGGGGCCCTGCTGGTGTGCAGGGAGGGCAGCCTGGCCAAGGAGAAGACCCAGA |
| | | | | | CCCTGCACAAGTTCATCCTGCTGTTTGCTGTGTTTGATGAGGGCAAGAGCTGGCACTCTGAAACCAAGAACAGCCTGAT |
| | | | | | GCAGGACAGGGATGCTGCCTCTGCCAGGGCCTGGCCCAAGATGCACACTGTGAATGGCTATGTGAACAGGAGCCTGCC |
| | | | | | TGGCCTGATTGGCTGCCACAGGAAGTCTGTGTACTGGCATGTGATTGGCATGGGCACCACCCCTGAGGTGCACAGCATC |
| | | | | | TTCCTGGAGGGCCACACCTTCCTGGTCAGGAACCACAGGCAGGCCAGCCTGGAGATCAGCCCCATCACCTTCCTGACTG |
| | | | | | CCCAGACCCTGCTGATGGACCTGGGCCAGTTCCTGCTGTTCTGCCACATCAGCAGCCACCAGCATGATGGCATGGAGGC |
| | | | | | CTATGTGAAGGTGGACAGCTGCCCTGAGGAGCCCCAGCTGAGGATGAAGAACAATGAGGAGGCTGAGGACTATGATG |
| | | | | | ATGACCTGACTGACTCTGAGATGGATGTGGTGAGGTTTGATGATGACAACAGCCCCAGCTTCATCCAGATCAGGTCTGT |
| | | | | | GGCCAAGAAGCACCCCAAGACCTGGGTGCACTACATTGCTGCTGAGGAGGAGGACTGGGACTATGCCCCCCTGGTGCT |
| | | | | | GGCCCCTGATGACAGGAGCTACAAGAGCCAGTACCTGAACAATGGCCCCCAGAGGATTGGCAGGAAGTACAAGAAGG |
| | | | | | TCAGGTTCATGGCCTACACTGATGAAACCTTCAAGACCAGGGAGGCCATCCAGCATGAGTCTGGCATCCTGGGCCCCCT |
| | | | | | GCTGTATGGGGAGGTGGGGGACACCCTGCTGATCATCTTCAAGAACCAGGCCAGCAGGCCCTACAACATCTACCCCCAT |
| | | | | | GGCATCACTGATGTGAGGCCCCTGTACAGCAGGAGGCTGCCCAAGGGGGTGAAGCACCTGAAGGACTTCCCCATCCTG |
| | | | | | CCTGGGGAGATCTTCAAGTACAAGTGGACTGTGACTGTGGAGGATGGCCCCACCAAGTCTGACCCCAGGTGCCTGACC |
| | | | | | AGATACTACAGCAGCTTTGTGAACATGGAGAGGGACCTGGCCTCTGGCCTGATTGGCCCCCTGCTGATCTGCTACAAGG |
| | | | | | AGTCTGTGGACCAGAGGGGCAACCAGATCATGTCTGACAAGAGGAATGTGATCCTGTTCTCTGTGTTTGATGAGAACA |
| | | | | | GGAGCTGGTACCTGACTGAGAACATCCAGAGGTTCCTGCCCAACCCTGCTGGGGTGCAGCTGGAGGACCCTGAGTTCC |
| | | | | | AGGCCAGCAACATCATGCACAGCATCAATGGCTATGTGTTTGACAGCCTGCAGCTGTCTGTGTGCCTGCATGAGGTGGC |
| | | | | | CTACTGGTACATCCTGAGCATTGGGGCCCAGACTGACTTCCTGTCTGTGTTCTTCTCTGGCTACACCTTCAAGCACAAGAT |
| | | | | | GGTGTATGAGGACACCCTGACCCTGTTCCCCTTCTCTGGGGAGACTGTGTTCATGAGCATGGAGAACCCTGGCCTGTGG |
| | | | | | ATTCTGGGCTGCCACAACTCTGACTTCAGGAACAGGGGCATGACTGCCCTGCTGAAAGTCTCCAGCTGTGACAAGAACA |
| | | | | | CTGGGGACTACTATGAGGACAGCTATGAGGACATCTCTGCCTACCTGCTGAGCAAGAACAATGCCATTGAGCCCAGGA |
| | | | | | GCTTCAGCCAGAACCCCCCAGTGCTGAAGAGGCACCAGAGGGAGATCACCAGGACCACCCTGCAGTCTGACCAGGAGG |
| | | | | | AGATTGACTATGATGACACCATCTCTGTGGAGATGAAGAAGGAGGACTTTGACATCTACGACGAGGACGAGAACCAGA |
| | | | | | GCCCCAGGAGCTTCCAGAAGAAGACCAGGCACTACTTCATTGCTGCTGTGGAGAGGCTGTGGGACTATGGCATGAGCA |
| | | | | | GCAGCCCCCATGTGCTGAGGAACAGGGCCCAGTCTGGCTCTGTGCCCCAGTTCAAGAAGGTGGTGTTCCAGGAGTTCA |
| | | | | | CTGATGGCAGCTTCACCCAGCCCCTGTACAGAGGGGAGCTGAATGAGCACCTGGGCCTGCTGGGCCCCTACATCAGGG |
| | | | | | CTGAGGTGGAGGACAACATCATGGTGACCTTCAGGAACCAGGCCAGCAGGCCCTACAGCTTCTACAGCAGCCTGATCA |
| | | | | | GCTATGAGGAGGACCAGAGGCAGGGGGCTGAGCCCAGGAAGAACTTTGTGAAGCCCAATGAAACCAAGACCTACTTCT |
| | | | | | GGAAGGTGCAGCACCACATGGCCCCCACCAAGGATGAGTTTGACTGCAAGGCCTGGGCCTACTTCTCTGATGTGGACCT |
| | | | | | GGAGAAGGATGTGCACTCTGGCCTGATTGGCCCCCTGCTGGTGTGCCACACCAACACCCTGAACCCTGCCCATGGCAGG |
| | | | | | CAGGTGACTGTGCAGGAGTTTGCCCTGTTCTTCACCATCTTTGATGAAACCAAGAGCTGGTACTTCACTGAGAACATGG |
| | | | | | AGAGGAACTGCAGGGCCCCCTGCAACATCCAGATGGAGGACCCCACCTTCAAGGAGAACTACAGGTTCCATGCCATCA |
| | | | | | ATGGCTACATCATGGACACCCTGCCTGGCCTGGTGATGGCCCAGGACCAGAGGATCAGGTGGTACCTGCTGAGCATGG |
| | | | | | GCAGCAATGAGAACATCCACAGCATCCACTTCTCTGGCCATGTGTTCACTGTGAGGAAGAAGGAGGAGTACAAGATGG |
| | | | | | CCCTGTACAACCTGTACCCTGGGGTGTTTGAGACTGTGGAGATGCTGCCCAGCAAGGCTGGCATCTGGAGGGTGGAGT |
| | | | | | GCCTGATTGGGGAGCACCTGCATGCTGGCATGAGCACCCTGTTCCTGGTGTACAGCAACAAGTGCCAGACCCCCCTGGG |
| | | | | | CATGGCCTCTGGCCACATCAGGGACTTCCAGATCACTGCCTCTGGCCAGTATGGCCAGTGGGCCCCCAAGCTGGCCAGG |
| | | | | | CTGCACTACTCTGGCAGCATCAATGCCTGGAGCACCAAGGAGCCCTTCAGCTGGATCAAGGTGGACCTGCTGGCCCCCA |
| | | | | | TGATCATCCATGGCATCAAGACCCAGGGGGCCAGGCAGAAGTTCAGCAGCCTGTACATCAGCCAGTTCATCATCATGTA |
| | | | | | CAGCCTGGATGGCAAGAAGTGGCAGACCTACAGGGGCAACAGCACTGGCACCCTGATGGTGTTCTTTGGCAATGTGGA |
| | | | | | CAGCTCTGGCATCAAGCACAACATCTTCAACCCCCCCATCATTGCCAGATACATCAGGCTGCACCCCACCCACTACAGCA |
| | | | | | TCAGGAGCACCCTGAGGATGGAGCTGATGGGCTGTGACCTGAACAGCTGCAGCATGCCCCTGGGCATGGAGAGCAAG |
| | | | | | GCCATCTCTGATGCCCAGATCACTGCCAGCAGCTACTTCACCAACATGTTTGCCACCTGGAGCCCCAGCAAGGCCAGGCT |
| | | | | | GCACCTGCAGGGCAGGAGCAATGCCTGGAGGCCCCAGGTCAACAACCCCAAGGAGTGGCTGCAGGTGGACTTCCAGA |
| | | | | | AGACCATGAAGGTGACTGGGGTGACCACCCAGGGGGTGAAGAGCCTGCTGACCAGCATGTATGTGAAGGAGTTCCTG |
| | | | | | ATCAGCAGCAGCCAGGATGGCCACCAGTGGACCCTGTTCTTCCAGAATGGCAAGGTGAAGGTGTTCCAGGGCAACCAG |
| | | | | | GACAGCTTCACCCCTGTGGTGAACAGCCTGGACCCCCCCCTGCTGACCAGATACCTGAGGATTCACCCCCAGAGCTGGG |
| | | | | | TGCACCAGATTGCCCTGAGGATGGAGGTGCTGGGCTGTGAGGCCCAGGACCTGTACTGA |
| B domain-deleted | 4374 | US2017 | 0 | 381 | ATGCAGATTGAGCTGAGCACCTGCTTCTTCCTGTGTCTGCTGAGGTTCTGCTTCTCTGCCACCAGGAGGTATTACCTGGG |
| (BDD) hEVIII with | | 0216408 | | | GGCTGTGGAGCTGAGCTGGGACTATATGCAGTCTGACCTGGGGGAGCTGCCTGTGGATGCTAGGTTCCCCCCCAGGGT |
| SQ sequence II | | A1 | | | GCCCAAGAGCTTCCCCTTTAACACTTCTGTGGTGTACAAGAAGACCCTGTTTGTGGAGTTCACTGACCACCTGTTCAACA |
| | | | | | TTGCCAAGCCCAGGCCCCCCTGGATGGGGCTGCTGGGGCCCACCATCCAGGCTGAGGTGTATGACACTGTGGTGATCA |
| | | | | | CCCTGAAGAACATGGCCAGCCACCCTGTGAGCCTGCATGCTGTGGGGGTGAGCTACTGGAAGGCTTCTGAGGGGGCTG |
| | | | | | AGTATGATGACCAGACTAGCCAGAGGGAGAAGGAGGATGACAAGGTGTTTCCTGGGGGCAGCCATACCTATGTGTGG |
| | | | | | CAGGTGCTGAAGGAGAATGGCCCCATGGCCTCTGACCCCCTGTGCCTGACCTACAGCTACCTGTCTCATGTGGACCTGG |
| | | | | | TGAAGGACCTGAACTCTGGCCTGATTGGGGCTCTGCTGGTGTGTAGGGAGGGCAGCCTGGCTAAGGAAAAGACCCAG |
| | | | | | ACCCTGCATAAGTTTATCCTGCTGTTTGCTGTGTTTGATGAGGGCAAGAGCTGGCACTCTGAGACCAAGAACAGCCTGA |
| | | | | | TGCAGGATAGGGATGCTGCCTCTGCCAGGGCTGGCCTAAGATGCACACTGTGAATGGGTATGTGAATAGGAGCCTGC |
| | | | | | CTGGCCTGATTGGCTGCCACAGGAAGTCTGTGTACTGGCATGTGATTGGGATGGGCACCACCCCTGAGGTCCATAGCAT |
| | | | | | CTTCCTGGAGGGCCACACTTTCCTGGTGAGGAACCACAGACAGGCCTCTCTGGAGATCTCTCCCATCACCTTCCTGACTG |
| | | | | | CTCAGACTCTGCTGATGGACCTGGGCCAGTTCCTGCTGTTTTGCCATATTAGCAGCCACCAGCATGATGGGATGGAGGC |
| | | | | | CTATGTGAAGGTGGATAGCTGCCCTGAGGAGCCTCAGCTGAGGATGAAGAACAATGAGGAGGCTGAAGACTATGATG |
| | | | | | ATGACCTGACTGATTCTGAGATGGATGTGGTGAGGTTTGATGATGACAATAGCCCCAGCTTCATTCAGATCAGGTCTGT |
| | | | | | GGCCAAGAAACACCCCAAGACCTGGGTGCACTACATTGCTGCTGAGGAAGAGGACTGGGACTATGCTCCCCTGGTGCT |
| | | | | | GGCCCCTGATGATAGGTCTTATAAGAGCCAGTACCTGAACAATGGGCCCCAGAGGATTGGCAGGAAGTACAAGAAGGT |
| | | | | | GAGGTTCATGGCCTACACTGATGAAACCTTCAAAACCAGGGAGGCCATTCAGCATGAGTCTGGCATCCTGGGCCCTCTG |
| | | | | | CTGTATGGGGAGGTGGGGGACACCCTGCTGATCATCTTCAAGAACCAGGCCAGCAGGCCCTACAACATCTATCCTCATG |
| | | | | | GCATCACTGATGTGAGGCCCCTGTACAGCAGGAGGCTGCCCAAGGGGGTGAAGCACCTGAAAGACTTCCCCATCCTGC |
| | | | | | CTGGGGAGATCTTTAAGTATAAGTGGACTGTGACTGTGGAGGATGGCCCTACCAAGTCTGACCCCAGGTGTCTGACCA |
| | | | | | GGTACTATTCTAGCTTTGTGAACATGGAGAGGGACCTGGCCTCTGGCCTGATTGGGCCCCTGCTGATCTGCTACAAGGA |
| | | | | | GTCTGTGGACCAGAGGGGCAACCAGATCATGTCTGACAAGAGGAATGTGATCCTGTTTTCTGTGTTTGATGAGAATAGG |
| | | | | | AGCTGGTACCTGACTGAGAACATCCAGAGGTTTCTGCCCAATCCTGCTGGGGTGCAGCTGGAGGATCCTGAGTTCCAGG |
| | | | | | CCAGCAATATCATGCATAGCATCAATGGCTATGTGTTTGACAGCCTGCAGCTGTCTGTGTGCCTGCATGAGGTGGCCTAC |
| | | | | | TGGTACATCCTGAGCATGGGGCCCAGACTGACTTTCTGTCTGTGTTCTTTTCTGGCTATACCTTCAAGCACAAGATGGT |
| | | | | | GTATGAGGATACCCTGACCCTGTTCCCCTTCTCTGGGGAGACTGTGTTCATGAGCATGGAGAATCCTGGGCTGTGGATC |
| | | | | | CTGGGGTGCCACAACTCTGATTTTAGGAACAGGGGGATGACTGCCCTGCTGAAGGTGTCTAGCTGTGATAAGAACACT |
| | | | | | GGGGACTACTATGAGGACAGCTATGAGGACATTTCTGCTTATCTGCTGTCTAAGAATAATGCCATTGAGCCCAGAAGCT |
| | | | | | TCAGCCAGAATCCCCCTGTGCTGAAGAGACATCAGAGGGAGATCACCAGAACTACCCTGCAGTCTGATCAGGAGGAGA |
| | | | | | TTGACTATGATGACACTATCTCTGTGGAGATGAAGAAGGAGGACTTTGACATCTATGATGAGGATGAGAATCAGTCTCC |
| | | | | | CAGGAGCTTTCAGAAGAAGACCAGACATTACTTCATTGCTGCTGTGGAGAGGCTGTGGGACTATGGCATGAGCTCTAG |
| | | | | | CCCTCATGTGCTGAGGAACAGGGCCCAGTCTGGCTCTGTGCCCCAGTTCAAGAAGGTGGTGTTCCAGGAATTCACTGAT |
| | | | | | GGCAGCTTCACCCAGCCCCTGTACAGGGGGGAGCTGAATGAGCACCTGGGCCTGCTGGGGCCTTATATCAGGGCTGAG |
| | | | | | GTGGAGGATAATATTATGGTGACTTTCAGGAACCAGGCCAGCAGGCCCTACTCTTTCTATAGCAGCCTGATCTCTTATGA |
| | | | | | GGAGGATCAGAGGCAGGGGGCTGAGCCTAGGAAGAACTTTGTGAAGCCCAATGAGACTAAGACCTACTTCTGGAAGG |
| | | | | | TCCAGCACCACATGGCCCCTACCAAGGATGAGTTTGACTGCAAGGCCTGGGCCTATTTCTCTGATGTGGATCTGGAGAA |
| | | | | | GGATGTCCATTCTGGGCTGATTGGCCCCCTGCTGGTGTGCCACACTAACACTCTGAATCCTGCCCATGGCAGGCAGGTG |
| | | | | | ACTGTCCAGGAGTTTGCCCTGTTCTTCACTATCTTTGATGAGACCAAGAGCTGGTACTTTACTGAGAACATGGAGAGGA |
| | | | | | ACTGCAGAGCTCCTTGCAATATTCAGATGGAGGACCCCACCTTCAAGGAGAATTACAGGTTCCATGCCATTAATGGGTA |
| | | | | | CATCATGGACACCCTGCCTGGCCTGGTGATGGCTCAGGACCAGAGGATCAGGTGGTACCTGCTGAGCATGGGCTCTAA |
| | | | | | TGAGAATATCCACAGCATCCACTTCTCTGGGCATGTGTTCACTGTGAGGAAGAAGGAGGAGTACAAGATGGCTCTGTAT |
| | | | | | AATCTGTACCCTGGGGTGTTTGAAACTGTGGAGATGCTGCCCTCTAAGGCTGGCATCTGGAGGGTGGAGTGCCTGATG |
| | | | | | GGGAGCACCTGCATGCTGGCATGAGCACCCTGTTCCTGGTGTACAGCAACAAGTGCCAGACCCCCCTGGGCATGGCCTC |
| | | | | | TGGCCACATCAGGGACTTCCAGATCACTGCCTCTGGCCAGTATGGCCAGTGGGCCCCCAAGCTGGCCAGGCTGCACTAT |
| | | | | | TCTGGCAGCATCAATGCCTGGAGCACCAAGGAGCCCTTCAGCTGGATCAAGGTGGACCTGCTGGCCCCCATGATCATTC |
| | | | | | ATGGCATCAAGACCCAGGGGGCCAGGCAGAAGTTCAGCTCTCTGTACATCTCTCAGTTCATCATCATGTACTCTCTGGAT |
| | | | | | GGGAAGAAGTGGCAGACCTACAGGGGCAACAGCACTGGCACCCTGATGGTGTTCTTTGGGAATGTGGACTCTTCTGGC |
| | | | | | ATCAAGCACAACATCTTCAATCCCCCCATCATTGCTAGGTATATTAGGCTGCATCCCACCCACTACAGCATCAGGTCTACC |
| | | | | | CTGAGGATGGAGCTGATGGGCTGTGACCTGAACTCTTGCAGCATGCCCCTGGGCATGGAGTCTAAGGCCATCTCTGATG |
| | | | | | CCCAGATTACTGCCAGCAGCTACTTCACCAACATGTTTGCCACCTGGAGCCCCTCTAAGGCCAGGCTGCATCTGCAGGG |
| | | | | | GAGGAGCAATGCCTGGAGGCCTCAGGTGAACAACCCCAAGGAGTGGCTGCAGGTGGATTTCCAGAAGACCATGAAGG |
| | | | | | TGACTGGGGTGACCACCCAGGGGGTCAAGAGCCTGCTGACCAGCATGTATGTGAAGGAGTTCCTGATCAGCAGCAGCC |
| | | | | | AGGATGGCCACCAGTGGACTCTGTTCTTTCAGAATGGGAAGGTGAAGGTGTTTCAGGGCAATCAGGACTCTTTCACCCC |
| | | | | | TGTGGTGAACAGCCTGGACCCCCCCCTGCTGACCAGATACCTGAGGATCCACCCCCAGTCTTGGGTGCATCAGATTGCC |
| | | | | | CTGAGGATGGAGGTGCTGGGCTGTGAGGCTCAGGATCTGTACTGA |
| B domain-deleted | 4374 | WO20170 | 9 | 382 | ATGCAGATCGAGCTCTCCACCTGCTTCTTTCTGTGCCTGTTGAGATTCTGCTTCAGCGCCACCAGGAGATACTACCTGGG |
| (BDD) hFVIII with | | 74526A1 | | | GGCTGTGGAGCTGAGCTGGGACTACATGCAGTCTGACCTGGGGGAGCTGCCTGTGGATGCCAGGTTCCCCCCCAGAGT |
| SQ sequencel II | | | | | GCCCAAGAGCTTCCCCTTCAACACCTCTGTGGTGTACAAGAAGACCCTGTTTGTGGAGTTCACTGACCACCTGTTCAACA |
| | | | | | TTGCCAAGCCCAGGCCCCCCTGGATGGGCCTGCTGGGCCCCACCATCCAGGCTGAGGTGTATGACACTGTGGTGATCAC |
| | | | | | CCTGAAGAACATGGCCAGCCACCCTGTGAGCCTGCATGCTGTGGGGGTGAGCTACTGGAAGGCCTCTGAGGGGGCTGA |
| | | | | | GTATGATGACCAGACCAGCCAGAGGGAGAAGGAGGATGACAAGGTGTTCCCTGGGGGCAGCCACACCTATGTGTGGC |
| | | | | | AGGTGCTGAAGGAGAATGGCCCCATGGCCTCTGACCCCCTGTGCCTGACCTACAGCTACCTGAGCCATGTGGACCTGGT |
| | | | | | GAAGGACCTGAACTCTGGCCTGATTGGGGCCCTGCTGGTGTGCAGGGAGGGCAGCCTGGCCAAGGAGAAGACCCAGA |
| | | | | | CCCTGCACAAGTTCATCCTGCTGTTTGCTGTGTTTGATGAGGGCAAGAGCTGGCACTCTGAAACCAAGAACAGCCTGAT |
| | | | | | GCAGGACAGGGATGCTGCCTCTGCCAGGGCCTGGCCCAAGATGCACACTGTGAATGGCTATGTGAACAGGAGCCTGCC |
| | | | | | TGGCCTGATTGGCTGCCACAGGAAGTCTGTGTACTGGCATGTGATTGGCATGGGCACCACCCCTGAGGTGCACAGCATC |
| | | | | | TTCCTGGAGGGCCACACCTTCCTGGTCAGGAACCACAGGCAGGCCAGCCTGGAGATCAGCCCCATCACCTTCCTGACTG |
| | | | | | CCCAGACCCTGCTGATGGACCTGGGCCAGTTCCTGCTGTTCTGCCACATCAGCAGCCACCAGCATGATGGCATGGAGGC |
| | | | | | CTATGTGAAGGTGGACAGCTGCCCTGAGGAGCCCCAGCTGAGGATGAAGAACAATGAGGAGGCTGAGGACTATGATG |
| | | | | | ATGACCTGACTGACTCTGAGATGGATGTGGTGAGGTTTGATGATGACAACAGCCCCAGCTTCATCCAGATCAGGTCTGT |
| | | | | | GGCCAAGAAGCACCCCAAGACCTGGGTGCACTACATTGCTGCTGAGGAGGAGGACTGGGACTATGCCCCCCTGGTGCT |
| | | | | | GGCCCCTGATGACAGGAGCTACAAGAGCCAGTACCTGAACAATGGCCCCCAGAGGATTGGCAGGAAGTACAAGAAGG |
| | | | | | TCAGGTTCATGGCCTACACTGATGAAACCTTCAAGACCAGGGAGGCCATCCAGCATGAGTCTGGCATCCTGGGCCCCCT |
| | | | | | GCTGTATGGGGAGGTGGGGGACACCCTGCTGATCATCTTCAAGAACCAGGCCAGCAGGCCCTACAACATCTACCCCCAT |
| | | | | | GGCATCACTGATGTGAGGCCCCTGTACAGCAGGAGGCTGCCCAAGGGGGTGAAGCACCTGAAGGACTTCCCCATCCTG |
| | | | | | CCTGGGGAGATCTTCAAGTACAAGTGGACTGTGACTGTGGAGGATGGCCCCACCAAGTCTGACCCCAGGTGCCTGACC |
| | | | | | AGATACTACAGCAGCTTTGTGAACATGGAGAGGGACCTGGCCTCTGGCCTGATGGCCCCCTGCTGATCTGCTACAAGG |
| | | | | | AGTCTGTGGACCAGAGGGGCAACCAGATCATGTCTGACAAGAGGAATGTGATCCTGTTCTCTGTGTTTGATGAGAACA |
| | | | | | GGAGCTGGTACCTGACTGAGAACATCCAGAGGTTCCTGCCCAACCCTGCTGGGGTGCAGCTGGAGGACCCTGAGTTCC |
| | | | | | AGGCCAGCAACATCATGCACAGCATCAATGGCTATGTGTTTGACAGCCTGCAGCTGTCTGTGTGCCTGCATGAGGTGGC |
| | | | | | CTACTGGTACATCCTGAGCATTGGGGCCCAGACTGACTTCCTGTCTGTGTTCTTCTCTGGCTACACCTTCAAGCACAAGAT |
| | | | | | GGTGTATGAGGACACCCTGACCCTGTTCCCCTTCTCTGGGGAGACTGTGTTCATGAGCATGGAGAACCCTGGCCTGTGG |
| | | | | | ATTCTGGGCTGCCACAACTCTGACTTCAGGAACAGGGGCATGACTGCCCTGCTGAAAGTCTCCAGCTGTGACAAGAACA |
| | | | | | CTGGGGACTACTATGAGGACAGCTATGAGGACATCTCTGCCTACCTGCTGAGCAAGAACAATGCCATTGAGCCCAGGA |
| | | | | | GCTTCAGCCAGAATCCACCCGTCCTTAAGCGCCATCAGCGCGAGATCACCAGGACCACCCTGCAGTCTGACCAGGAGGA |
| | | | | | GATTGACTATGATGACACCATCTCTGTGGAGATGAAGAAGGAGGACTTTGACATCTACGACGAGGACGAGAACCAGAG |
| | | | | | CCCCAGGAGCTTCCAGAAGAAGACCAGGCACTACTTCATTGCTGCTGTGGAGAGGCTGTGGGACTATGGCATGAGCAG |
| | | | | | CAGCCCCCATGTGCTGAGGAACAGGGCCCAGTCTGGCTCTGTGCCCCAGTTCAAGAAGGTGGTGTTCCAGGAGTTCACT |
| | | | | | GATGGCAGCTTCACCCAGCCCCTGTACAGAGGGGAGCTGAATGAGCACCTGGGCCTGCTGGGCCCCTACATCAGGGCT |
| | | | | | GAGGTGGAGGACAACATCATGGTGACCTTCAGGAACCAGGCCAGCAGGCCCTACAGCTTCTACAGCAGCCTGATCAGC |
| | | | | | TATGAGGAGGACCAGAGGCAGGGGGCTGAGCCCAGGAAGAACTTTGTGAAGCCCAATGAAACCAAGACCTACTTCTG |
| | | | | | GAAGGTGCAGCACCACATGGCCCCCACCAAGGATGAGTTTGACTGCAAGGCCTGGGCCTACTTCTCTGATGTGGACCTG |
| | | | | | GAGAAGGATGTGCACTCTGGCCTGATTGGCCCCCTGCTGGTGTGCCACACCAACACCCTGAACCCTGCCCATGGCAGGC |
| | | | | | AGGTGACTGTGCAGGAGTTTGCCCTGTTCTTCACCATCTTTGATGAAACCAAGAGCTGGTACTTCACTGAGAACATGGA |
| | | | | | GAGGAACTGCAGGGCCCCCTGCAACATCCAGATGGAGGACCCCACCTTCAAGGAGAACTACAGGTTCCATGCCATCAAT |
| | | | | | GGCTACATCATGGACACCCTGCCTGGCCTGGTGATGGCCCAGGACCAGAGGATCAGGTGGTACCTGCTGAGCATGGGC |
| | | | | | AGCAATGAGAACATCCACAGCATCCACTTCTCTGGCCATGTGTTCACTGTGAGGAAGAAGGAGGAGTACAAGATGGCC |
| | | | | | CTGTACAACCTGTACCCTGGGGTGTTTGAGACTGTGGAGATGCTGCCCAGCAAGGCTGGCATCTGGAGGGTGGAGTGC |
| | | | | | CTGATTGGGGAGCACCTGCATGCTGGCATGAGCACCCTGTTCCTGGTGTACAGCAACAAGTGCCAGACCCCCCTGGGCA |
| | | | | | TGGCCTCTGGCCACATCAGGGACTTCCAGATCACTGCCTCTGGCCAGTATGGCCAGTGGGCCCCCAAGCTGGCCAGGCT |
| | | | | | GCACTACTCTGGCAGCATCAATGCCTGGAGCACCAAGGAGCCCTTCAGCTGGATCAAGGTGGACCTGCTGGCCCCCATG |
| | | | | | ATCATCCATGGCATCAAGACCCAGGGGGCCAGGCAGAAGTTCAGCAGCCTGTACATCAGCCAGTTCATCATCATGTACA |
| | | | | | GCCTGGATGGCAAGAAGTGGCAGACCTACAGGGGCAACAGCACTGGCACCCTGATGGTGTTCTTTGGCAATGTGGACA |
| | | | | | GCTCTGGCATCAAGCACAACATCTTCAACCCCCCCATCATTGCCAGATACATCAGGCTGCACCCCACCCACTACAGCATC |
| | | | | | AGGAGCACCCTGAGGATGGAGCTGATGGGCTGTGACCTGAACAGCTGCAGCATGCCCCTGGGCATGGAGAGCAAGGC |
| | | | | | CATCTCTGATGCCCAGATCACTGCCAGCAGCTACTTCACCAACATGTTTGCCACCTGGAGCCCCAGCAAGGCCAGGCTGC |
| | | | | | ATCTGCAGGGCAGGAGCAATGCCTGGAGGCCCCAGGTCAACAACCCCAAGGAGTGGCTGCAGGTGGACTTCCAGAAG |
| | | | | | ACCATGAAGGTGACTGGGGTGACCACCCAGGGGGTGAAGAGCCTGCTGACCAGCATGTATGTGAAGGAGTTCCTGATC |
| | | | | | AGCAGCAGCCAGGATGGCCACCAGTGGACCCTGTTCTTCCAGAATGGCAAGGTGAAGGTGTTCCAGGGCAACCAGGAC |
| | | | | | AGCTTCACCCCTGTGGTGAACAGCCTGGACCCCCCCCTGCTGACCAGATACCTGAGGATTCACCCCCAGAGCTGGGTGC |
| | | | | | ACCAGATTGCCCTGAGGATGGAGGTGCTGGGCTGTGAGGCCCAGGACCTGTACTGA |
| Endogenous | 7056 | NG_ | 70 | 383 | ATGCAAATAGAGCTCTCCACCTGCTTCTTTCTGTGCCTTTTGCGATTCTGCTTTAGTGCCACCAGAAGATACTACCTGGGT |
| hFVIII cDNA | | 011403.1 | | | GCAGTGGAACTGTCATGGGACTATATGCAAAGTGATCTCGGTGAGCTGCCTGTGGACGCAAGATTTCCTCCTAGAGTGC |
| | | | | | CAAAATCTTTTCCATTCAACACCTCAGTCGTGTACAAAAAGACTCTGTTTGTAGAATTCACGGATCACCTTTTCAACATCG |
| | | | | | CTAAGCCAAGGCCACCCTGGATGGGTCTGCTAGGTCCTACCATCCAGGCTGAGGTTTATGATACAGTGGTCATTACACTT |
| | | | | | AAGAACATGGCTTCCCATCCTGTCAGTCTTCATGCTGTTGGTGTATCCTACTGGAAAGCTTCTGAGGGAGCTGAATATGA |
| | | | | | TGATCAGACCAGTCAAAGGGAGAAAGAAGATGATAAAGTCTTCCCTGGTGGAAGCCATACATATGTCTGGCAGGTCCT |
| | | | | | GAAAGAGAATGGTCCAATGGCCTCTGACCCACTGTGCCTTACCTACTCATATCTTTCTCATGTGGACCTGGTAAAAGACT |
| | | | | | TGAATTCAGGCCTCATTGGAGCCCTACTAGTATGTAGAGAAGGGAGTCTGGCCAAGGAAAAGACACAGACCTTGCACA |
| | | | | | AATTTATACTACTTTTTGCTGTATTTGATGAAGGGAAAAGTTGGCACTCAGAAACAAAGAACTCCTTGATGCAGGATAG |
| | | | | | GGATGCTGCATCTGCTCGGGCCTGGCCTAAAATGCACACAGTCAATGGTTATGTAAACAGGTCTCTGCCAGGTCTGATT |
| | | | | | GGATGCCACAGGAAATCAGTCTATTGGCATGTGATTGGAATGGGCACCACTCCTGAAGTGCACTCAATATTCCTCGAAG |
| | | | | | GTCACACATTTCTTGTGAGGAACCATCGCCAGGCGTCCTTGGAAATCTCGCCAATAACTTTCCTTACTGCTCAAACACTCT |
| | | | | | TGATGGACCTTGGACAGTTTCTACTGTTTTGTCATATCTCTTCCCACCAACATGATGGCATGGAAGCTTATGTCAAAGTA |
| | | | | | GACAGCTGTCCAGAGGAACCCCAACTACGAATGAAAAATAATGAAGAAGCGGAAGACTATGATGATGATCTTACTGAT |
| | | | | | TCTGAAATGGATGTGGTCAGGTTTGATGATGACAACTCTCCTTCCTTTATCCAAATTCGCTCAGTTGCCAAGAAGCATCCT |
| | | | | | AAAACTTGGGTACATTACATTGCTGCTGAAGAGGAGGACTGGGACTATGCTCCCTTAGTCCTCGCCCCCGATGACAGAA |
| | | | | | GTTATAAAAGTCAATATTTGAACAATGGCCCTCAGCGGATTGGTAGGAAGTACAAAAAAGTCCGATTTATGGCATACAC |
| | | | | | AGATGAAACCTTTAAGACTCGTGAAGCTATTCAGCATGAATCAGGAATCTTGGGACCTTTACTTTATGGGGAAGTTGGA |
| | | | | | GACACACTGTTGATTATATTTAAGAATCAAGCAAGCAGACCATATAACATCTACCCTCACGGAATCACTGATGTCCGTCC |
| | | | | | TTTGTATTCAAGGAGATTACCAAAAGGTGTAAAACATTTGAAGGATTTTCCAATTCTGCCAGGAGAAATATTCAAATATA |
| | | | | | AATGGACAGTGACTGTAGAAGATGGGCCAACTAAATCAGATCCTCGGTGCCTGACCCGCTATTACTCTAGTTTCGTTAAT |
| | | | | | ATGGAGAGAGATCTAGCTTCAGGACTCATTGGCCCTCTCCTCATCTGCTACAAAGAATCTGTAGATCAAAGAGGAAACC |
| | | | | | AGATAATGTCAGACAAGAGGAATGTCATCCTGTTTTCTGTATTTGATGAGAACCGAAGCTGGTACCTCACAGAGAATAT |
| | | | | | ACAACGCTTTCTCCCCAATCCAGCTGGAGTGCAGCTTGAGGATCCAGAGTTCCAAGCCTCCAACATCATGCACAGCATCA |
| | | | | | ATGGCTATGTTTTTGATAGTTTGCAGTTGTCAGTTTGTTTGCATGAGGTGGCATACTGGTACATTCTAAGCATTGGAGCA |
| | | | | | CAGACTGACTTCCTTTCTGTCTTCTTCTCTGGATATACCTTCAAACACAAAATGGTCTATGAAGACACACTCACCCTATTCC |
| | | | | | CATTCTCAGGAGAAACTGTCTTCATGTCGATGGAAAACCCAGGTCTATGGATTCTGGGGTGCCACAACTCAGACTTTCG |
| | | | | | GAACAGAGGCATGACCGCCTTACTGAAGGTTTCTAGTTGTGACAAGAACACTGGTGATTATTACGAGGACAGTTATGAA |
| | | | | | GATATTTCAGCATACTTGCTGAGTAAAAACAATGCCATTGAACCAAGAAGCTTCTCCCAGAATTCAAGACACCCTAGCAC |
| | | | | | TAGGCAAAAGCAATTTAATGCCACCACAATTCCAGAAAATGACATAGAGAAGACTGACCCTTGGTTTGCACACAGAACA |
| | | | | | CCTATGCCTAAAATACAAAATGTCTCCTCTAGTGATTTGTTGATGCTCTTGCGACAGAGTCCTACTCCACATGGGCTATCC |
| | | | | | TTATCTGATCTCCAAGAAGCCAAATATGAGACTTTTTCTGATGATCCATCACCTGGAGCAATAGACAGTAATAACAGCCT |
| | | | | | GTCTGAAATGACACACTTCAGGCCACAGCTCCATCACAGTGGGGACATGGTATTTACCCCTGAGTCAGGCCTCCAATTAA |
| | | | | | GATTAAATGAGAAACTGGGGACAACTGCAGCAACAGAGTTGAAGAAACTTGATTTCAAAGTTTCTAGTACATCAAATAA |
| | | | | | TCTGATTTCAACAATTCCATCAGACAATTTGGCAGCAGGTACTGATAATACAAGTTCCTTAGGACCCCCAAGTATGCCAG |
| | | | | | TTCATTATGATAGTCAATTAGATACCACTCTATTTGGCAAAAAGTCATCTCCCCTTACTGAGTCTGGTGGACCTCTGAGCT |
| | | | | | TGAGTGAAGAAAATAATGATTCAAAGTTGTTAGAATCAGGTTTAATGAATAGCCAAGAAAGTTCATGGGGAAAAAATG |
| | | | | | TATCGTCAACAGAGAGTGGTAGGTTATTTAAAGGGAAAAGAGCTCATGGACCTGCTTTGTTGACTAAAGATAATGCCTT |
| | | | | | ATTCAAAGTTAGCATCTCTTTGTTAAAGACAAACAAAACTTCCAATAATTCAGCAACTAATAGAAAGACTCACATTGATG |
| | | | | | GCCCATCATTATTAATTGAGAATAGTCCATCAGTCTGGCAAAATATATTAGAAAGTGACACTGAGTTTAAAAAAGTGACA |
| | | | | | CCTTTGATTCATGACAGAATGCTTATGGACAAAAATGCTACAGCTTTGAGGCTAAATCATATGTCAAATAAAACTACTTC |
| | | | | | ATCAAAAAACATGGAAATGGTCCAACAGAAAAAAGAGGGCCCCATTCCACCAGATGCACAAAATCCAGATATGTCGTTC |
| | | | | | TTTAAGATGCTATTCTTGCCAGAATCAGCAAGGTGGATACAAAGGACTCATGGAAAGAACTCTCTGAACTCTGGGCAAG |
| | | | | | GCCCCAGTCCAAAGCAATTAGTATCCTTAGGACCAGAAAAATCTGTGGAAGGTCAGAATTTCTTGTCTGAGAAAAACAA |
| | | | | | AGTGGTAGTAGGAAAGGGTGAATTTACAAAGGACGTAGGACTCAAAGAGATGGTTTTTCCAAGCAGCAGAAACCTATT |
| | | | | | TCTTACTAACTTGGATAATTTACATGAAAATAATACACACAATCAAGAAAAAAAAATTCAGGAAGAAATAGAAAAGAAG |
| | | | | | GAAACATTAATCCAAGAGAATGTAGTTTTGCCTCAGATACATACAGTGACTGGCACTAAGAATTTCATGAAGAACCTTTT |
| | | | | | CTTACTGAGCACTAGGCAAAATGTAGAAGGTTCATATGACGGGGCATATGCTCCAGTACTTCAAGATTTTAGGTCATTAA |
| | | | | | ATGATTCAACAAATAGAACAAAGAAACACACAGCTCATTTCTCAAAAAAAGGGGAGGAAGAAAACTTGGAAGGCTGG |
| | | | | | GAAATCAAACCAAGCAAATTGTAGAGAAATATGCATGCACCACAAGGATATCTCCTAATACAAGCCAGCAGAATTTTGT |
| | | | | | CACGCAACGTAGTAAGAGAGCTTTGAAACAATTCAGACTCCCACTAGAAGAAACAGAACTTGAAAAAAGGATAATTGT |
| | | | | | GGATGACACCTCAACCCAGTGGTCCAAAAACATGAAACATTTGACCCCGAGCACCCTCACACAGATAGACTACAATGAG |
| | | | | | AAGGAGAAAGGGGCCATTACTCAGTCTCCCTTATCAGATTGCCTTACGAGGAGTCATAGCATCCCTCAAGCAAATAGAT |
| | | | | | CTCCATTACCCATTGCAAAGGTATCATCATTTCCATCTATTAGACCTATATATCTGACCAGGGTCCTATTCCAAGACAACT |
| | | | | | CTTCTCATCTTCCAGCAGCATCTTATAGAAAGAAAGATTCTGGGGTCCAAGAAAGCAGTCATTTCTTACAAGGAGCCAAA |
| | | | | | AAAAATAACCTTTCTTTAGCCATTCTAACCTTGGAGATGACTGGTGATCAAAGAGAGGTTGGCTCCCTGGGGACAAGTG |
| | | | | | CCACAAATTCAGTCACATACAAGAAAGTTGAGAACACTGTTCTCCCGAAACCAGACTTGCCCAAAACATCTGGCAAAGTT |
| | | | | | GAATTGCTTCCAAAAGTTCACATTTATCAGAAGGACCTATTCCCTACGGAAACTAGCAATGGGTCTCCTGGCCATCTGGA |
| | | | | | TCTCGTGGAAGGGAGCCTTCTTCAGGGAACAGAGGGAGCGATTAAGTGGAATGAAGCAAACAGACCTGGAAAAGTTC |
| | | | | | CCTTTCTGAGAGTAGCAACAGAAAGCTCTGCAAAGACTCCCTCCAAGCTATTGGATCCTCTTGCTGGGATAACCACTAT |
| | | | | | GGTACTCAGATACCAAAAGAAGAGTGGAAATCCCAAGAGAAGTCACCAGAAAAAACAGCTTTTAAGAAAAAGGATACC |
| | | | | | ATTTTGTCCCTGAACGCTTGTGAAAGCAATCATGCAATAGCAGCAATAAATGAGGGACAAAATAAGCCCGAAATAGAA |
| | | | | | GTCACCTGGGCAAAGCAAGGTAGGACTGAAAGGCTGTGCTCTCAAAACCCACCAGTCTTGAAACGCCATCAACGGGAA |
| | | | | | ATAACTCGTACTACTCTTCAGTCAGATCAAGAGGAAATTGACTATGATGATACCATATCAGTTGAAATGAAGAAGGAAG |
| | | | | | ATTTTGACATTTATGATGAGGATGAAAATCAGAGCCCCCGCAGCTTTCAAAAGAAAACACGACACTATTTTATTGCTGCA |
| | | | | | GTGGAGAGGCTCTGGGATTATGGGATGAGTAGCTCCCCACATGTTCTAAGAAACAGGGCTCAGAGTGGCAGTGTCCCT |
| | | | | | CAGTTCAAGAAAGTTGTTTTCCAGGAATTTACTGATGGCTCCTTTACTCAGCCCTTATACCGTGGAGAACTAAATGAACA |
| | | | | | TTTGGGACTCCTGGGGCCATATATAAGAGCAGAAGTTGAAGATAATATCATGGTAACTTTCAGAAATCAGGCCTCTCGT |
| | | | | | CCCTATTCCTTCTATTCTAGCCTTATTTCTTATGAGGAAGATCAGAGGCAAGGAGCAGAACCTAGAAAAAACTTTGTCAA |
| | | | | | GCCTAATGAAACCAAAACTTACTTTTGGAAAGTGCAACATCATATGGCACCCACTAAAGATGAGTTTGACTGCAAAGCCT |
| | | | | | GGGCTTATTTCTCTGATGTTGACCTGGAAAAAGATGTGCACTCAGGCCTGATTGGACCCCTTCTGGTCTGCCACACTAAC |
| | | | | | ACACTGAACCCTGCTCATGGGAGACAAGTGACAGTACAGGAATTTGCTCTGTTTTTCACCATCTTTGATGAGACCAAAAG |
| | | | | | CTGGTACTTCACTGAAAATATGGAAAGAAACTGCAGGGCTCCCTGCAATATCCAGATGGAAGATCCCACTTTTAAAGAG |
| | | | | | AATTATCGCTTCCATGCAATCAATGGCTACATAATGGATACACTACCTGGCTTAGTAATGGCTCAGGATCAAAGGATTCG |
| | | | | | ATGGTATCTGCTCAGCATGGGCAGCAATGAAAACATCCATTCTATTCATTTCAGTGGACATGTGTTCACTGTACGAAAAA |
| | | | | | AAGAGGAGTATAAAATGGCACTGTACAATCTCTATCCAGGTGTTTTTGAGACAGTGGAAATGTTACCATCCAAAGCTGG |
| | | | | | AATTTGGCGGGTGGAATGCCTTATTGGCGAGCATCTACATGCTGGGATGAGCACACTTTTTCTGGTGTACAGCAATAAG |
| | | | | | TGTCAGACTCCCCTGGGAATGGCTTCTGGACACATTAGAGATTTTCAGATTACAGCTTCAGGACAATATGGACAGTGGG |
| | | | | | CCCCAAAGCTGGCCAGACTTCATTATTCCGGATCAATCAATGCCTGGAGCACCAAGGAGCCCTTTTCTTGGATCAAGGTG |
| | | | | | GATCTGTTGGCACCAATGATTATTCACGGCATCAAGACCCAGGGTGCCCGTCAGAAGTTCTCCAGCCTCTACATCTCTCA |
| | | | | | GTTTATCATCATGTATAGTCTTGATGGGAAGAAGTGGCAGACTTATCGAGGAAATTCCACTGGAACCTTAATGGTCTTCT |
| | | | | | TTGGCAATGTGGATTCATCTGGGATAAAACACAATATTTTTAACCCTCCAATTATTGCTCGATACATCCGTTTGCACCCAA |
| | | | | | CTCATTATAGCATTCGCAGCACTCTTCGCATGGAGTTGATGGGCTGTGATTTAAATAGTTGCAGCATGCCATTGGGAATG |
| | | | | | GAGAGTAAAGCAATATCAGATGCACAGATTACTGCTTCATCCTACTTTACCAATATGTTTGCCACCTGGTCTCCTTCAAAA |
| | | | | | GCTCGACTTCACCTCCAAGGGAGGAGTAATGCCTGGAGACCTCAGGTGAATAATCCAAAAGAGTGGCTGCAAGTGGAC |
| | | | | | TTCCAGAAGACAATGAAAGTCACAGGAGTAACTACTCAGGGAGTAAAATCTCTGCTTACCAGCATGTATGTGAAGGAGT |
| | | | | | TCCTCATCTCCAGCAGTCAAGATGGCCATCAGTGGACTCTCTTTTTTCAGAATGGCAAAGTAAAGGTTTTTCAGGGAAAT |
| | | | | | CAAGACTCCTTCACACCTGTGGTGAACTCTCTAGACCCACCGTTACTGACTCGCTACCTTCGAATTCACCCCCAGAGTTGG |
| | | | | | GTGCACCAGATTGCCCTGAGGATGGAGGTTCTGGGCTGCGAGGCACAGGACCTCTACTGA |
| B domain-deleted | 4425 | https:// | 3 | 384 | ATGCAGATTGAGCTGAGCACCTGCTTCTTCCTGTGCCTGCTGAGGTTCTGCTTCTCTGCCACCAGGAGATACTACCTGGG |
| (BDD) hEVIII with | | www.ncbi. | | | GGCTGTGGAGCTGAGCTGGGACTACATGCAGTCTGACCTGGGGGAGCTGCCTGTGGATGCCAGGTTCCCCCCCAGAGT |
| SQ sequence, 6 | | nlm.nih. | | | GCCCAAGAGCTTCCCCTTCAACACCTCTGTGGTGTACAAGAAGACCCTGTTTGTGGAGTTCACTGACCACCTGTTCAACA |
| N-linked | | gov/ | | | TTGCCAAGCCCAGGCCCCCCTGGATGGGCCTGCTGGGCCCCACCATCCAGGCTGAGGTGTATGACACTGTGGTGATCAC |
| glycosylation | | pubmed/ | | | CCTGAAGAACATGGCCAGCCACCCTGTGAGCCTGCATGCTGTGGGGGTGAGCTACTGGAAGGCCTCTGAGGGGGCTGA |
| sites, and furin | | 23426947 | | | GTATGATGACCAGACCAGCCAGAGGGAGAAGGAGGATGACAAGGTGTTCCCTGGGGGCAGCCACACCTATGTGTGGC |
| cleavage site | | | | | AGGTGCTGAAGGAGAATGGCCCCATGGCCTCTGACCCCCTGTGCCTGACCTACAGCTACCTGAGCCATGTGGACCTGGT |
| (SFSQNATNVSNNSNT | | | | | GAAGGACCTGAACTCTGGCCTGATTGGGGCCCTGCTGGTGTGCAGGGAGGGCAGCCTGGCCAAGGAGAAGACCCAGA |
| SNDSNVSPPVLKRHQR) | | | | | CCCTGCACAAGTTCATCCTGCTGTTTGCTGTGTTTGATGAGGGCAAGAGCTGGCACTCTGAAACCAAGAACAGCCTGAT |
| | | | | | GCAGGACAGGGATGCTGCCTCTGCCAGGGCCTGGCCCAAGATGCACACTGTGAATGGCTATGTGAACAGGAGCCTGCC |
| | | | | | TGGCCTGATTGGCTGCCACAGGAAGTCTGTGTACTGGCATGTGATTGGCATGGGCACCACCCCTGAGGTGCACAGCATC |
| | | | | | TTCCTGGAGGGCCACACCTTCCTGGTCAGGAACCACAGGCAGGCCAGCCTGGAGATCAGCCCCATCACCTTCCTGACTG |
| | | | | | CCCAGACCCTGCTGATGGACCTGGGCCAGTTCCTGCTGTTCTGCCACATCAGCAGCCACCAGCATGATGGCATGGAGGC |
| | | | | | CTATGTGAAGGTGGACAGCTGCCCTGAGGAGCCCCAGCTGAGGATGAAGAACAATGAGGAGGCTGAGGACTATGATG |
| | | | | | ATGACCTGACTGACTCTGAGATGGATGTGGTGAGGTTTGATGATGACAACAGCCCCAGCTTCATCCAGATCAGGTCTGT |
| | | | | | GGCCAAGAAGCACCCCAAGACCTGGGTGCACTACATTGCTGCTGAGGAGGAGGACTGGGACTATGCCCCCCTGGTGCT |
| | | | | | GGCCCCTGATGACAGGAGCTACAAGAGCCAGTACCTGAACAATGGCCCCCAGAGGATTGGCAGGAAGTACAAGAAGG |
| | | | | | TCAGGTTCATGGCCTACACTGATGAAACCTTCAAGACCAGGGAGGCCATCCAGCATGAGTCTGGCATCCTGGGCCCCCT |
| | | | | | GCTGTATGGGGAGGTGGGGGACACCCTGCTGATCATCTTCAAGAACCAGGCCAGCAGGCCCTACAACATCTACCCCCAT |
| | | | | | GGCATCACTGATGTGAGGCCCCTGTACAGCAGGAGGCTGCCCAAGGGGGTGAAGCACCTGAAGGACTTCCCCATCCTG |
| | | | | | CCTGGGGAGATCTTCAAGTACAAGTGGACTGTGACTGTGGAGGATGGCCCCACCAAGTCTGACCCCAGGTGCCTGACC |
| | | | | | AGATACTACAGCAGCTTTGTGAACATGGAGAGGGACCTGGCCTCTGGCCTGATTGGCCCCCTGCTGATCTGCTACAAGG |
| | | | | | AGTCTGTGGACCAGAGGGGCAACCAGATCATGTCTGACAAGAGGAATGTGATCCTGTTCTCTGTGTTTGATGAGAACA |
| | | | | | GGAGCTGGTACCTGACTGAGAACATCCAGAGGTTCCTGCCCAACCCTGCTGGGGTGCAGCTGGAGGACCCTGAGTTCC |
| | | | | | AGGCCAGCAACATCATGCACAGCATCAATGGCTATGTGTTTGACAGCCTGCAGCTGTCTGTGTGCCTGCATGAGGTGGC |
| | | | | | CTACTGGTACATCCTGAGCATTGGGGCCCAGACTGACTTCCTGTCTGTGTTCTTCTCTGGCTACACCTTCAAGCACAAGAT |
| | | | | | GGTGTATGAGGACACCCTGACCCTGTTCCCCTTCTCTGGGGAGACTGTGTTCATGAGCATGGAGAACCCTGGCCTGTGG |
| | | | | | ATTCTGGGCTGCCACAACTCTGACTTCAGGAACAGGGGCATGACTGCCCTGCTGAAAGTCTCCAGCTGTGACAAGAACA |
| | | | | | CTGGGGACTACTATGAGGACAGCTATGAGGACATCTCTGCCTACCTGCTGAGCAAGAACAATGCCATTGAGCCCAGGA |
| | | | | | GCTTCAGCCAGAATGCCACTAATGTGTCTAACAACAGCAACACCAGCAATGACAGCAATGTGTCTCCCCCAGTGCTGAA |
| | | | | | GAGGCACCAGAGGGAGATCACCAGGACCACCCTGCAGTCTGACCAGGAGGAGATTGACTATGATGACACCATCTCTGT |
| | | | | | GGAGATGAAGAAGGAGGACTTTGACATCTACGACGAGGACGAGAACCAGAGCCCCAGGAGCTTCCAGAAGAAGACCA |
| | | | | | GGCACTACTTCATTGCTGCTGTGGAGAGGCTGTGGGACTATGGCATGAGCAGCAGCCCCCATGTGCTGAGGAACAGGG |
| | | | | | CCCAGTCTGGCTCTGTGCCCCAGTTCAAGAAGGTGGTGTTCCAGGAGTTCACTGATGGCAGCTTCACCCAGCCCCTGTAC |
| | | | | | AGAGGGGAGCTGAATGAGCACCTGGGCCTGCTGGGCCCCTACATCAGGGCTGAGGTGGAGGACAACATCATGGTGAC |
| | | | | | CTTCAGGAACCAGGCCAGCAGGCCCTACAGCTTCTACAGCAGCCTGATCAGCTATGAGGAGGACCAGAGGCAGGGGGC |
| | | | | | TGAGCCCAGGAAGAACTTTGTGAAGCCCAATGAAACCAAGACCTACTTCTGGAAGGTGCAGCACCACATGGCCCCCACC |
| | | | | | AAGGATGAGTTTGACTGCAAGGCCTGGGCCTACTTCTCTGATGTGGACCTGGAGAAGGATGTGCACTCTGGCCTGATTG |
| | | | | | GCCCCCTGCTGGTGTGCCACACCAACACCCTGAACCCTGCCCATGGCAGGCAGGTGACTGTGCAGGAGTTTGCCCTGTT |
| | | | | | CTTCACCATCTTTGATGAAACCAAGAGCTGGTACTTCACTGAGAACATGGAGAGGAACTGCAGGGCCCCCTGCAACATC |
| | | | | | CAGATGGAGGACCCCACCTTCAAGGAGAACTACAGGTTCCATGCCATCAATGGCTACATCATGGACACCCTGCCTGGCC |
| | | | | | TGGTGATGGCCCAGGACCAGAGGATCAGGTGGTACCTGCTGAGCATGGGCAGCAATGAGAACATCCACAGCATCCACT |
| | | | | | TCTCTGGCCATGTGTTCACTGTGAGGAAGAAGGAGGAGTACAAGATGGCCCTGTACAACCTGTACCCTGGGGTGTTTGA |
| | | | | | GACTGTGGAGATGCTGCCCAGCAAGGCTGGCATCTGGAGGGTGGAGTGCCTGATTGGGGAGCACCTGCATGCTGGCA |
| | | | | | TGAGCACCCTGTTCCTGGTGTACAGCAACAAGTGCCAGACCCCCCTGGGCATGGCCTCTGGCCACATCAGGGACTTCCA |
| | | | | | GATCACTGCCTCTGGCCAGTATGGCCAGTGGGCCCCCAAGCTGGCCAGGCTGCACTACTCTGGCAGCATCAATGCCTGG |
| | | | | | AGCACCAAGGAGCCCTTCAGCTGGATCAAGGTGGACCTGCTGGCCCCCATGATCATCCATGGCATCAAGACCCAGGGG |
| | | | | | GCCAGGCAGAAGTTCAGCAGCCTGTACATCAGCCAGTTCATCATCATGTACAGCCTGGATGGCAAGAAGTGGCAGACCT |
| | | | | | ACAGGGGCAACAGCACTGGCACCCTGATGGTGTTCTTTGGCAATGTGGACAGCTCTGGCATCAAGCACAACATCTTCAA |
| | | | | | CCCCCCCATCATTGCCAGATACATCAGGCTGCACCCCACCCACTACAGCATCAGGAGCACCCTGAGGATGGAGCTGATG |
| | | | | | GGCTGTGACCTGAACAGCTGCAGCATGCCCCTGGGCATGGAGAGCAAGGCCATCTCTGATGCCCAGATCACTGCCAGC |
| | | | | | AGCTACTTCACCAACATGTTTGCCACCTGGAGCCCCAGCAAGGCCAGGCTGCACCTGCAGGGCAGGAGCAATGCCTGG |
| | | | | | AGGCCCCAGGTCAACAACCCCAAGGAG-MGCTGCAGGTGGACTTCCAGAAGACCATGAAGGTGACTGGGGTGACCAC |
| | | | | | CCAGGGGGTGAAGAGCCTGCTGACCAGCATGTATGTGAAGGAGTTCCTGATCAGCAGCAGCCAGGATGGCCACCAGTG |
| | | | | | GACCCTGTTCTTCCAGAATGGCAAGGTGAAGGTGTTCCAGGGCAACCAGGACAGCTTCACCCCTGTGGTGAACAGCCTG |
| | | | | | GACCCCCCCCTGCTGACCAGATACCTGAGGATTCACCCCCAGAGCTGGGTGCACCAGATTGCCCTGAGGATGGAGGTGC |
| | | | | | TGGGCTGTGAGGCCCAGGACCTGTACTGA |
| B domain-deleted | | | | 385 | MQIELSTCFFLCLLRFCFSATRRYYLGAVELSWDYMQSDLGELPVDARFPPRVPKSFPFNTSVVYKKTLFVEFTDHLFNIAKPRP |
| (BDD) hFVIII with | | | | | PWMGLLGPTIQAEVYDTVVITLKNMASHPVSLHAVGVSYWKASEGAEYDDQTSQREKEDDKVFPGGSHTYVWQVLKENG |
| SQ sequence, 6 | | | | | PMASDPLCLTYSYLSHVDLVKDLNSGLIGALLVCREGSLAKEKTQTLHKFILLFAVFDEGKSWHSETKNSLMQDRDAASARAW |
| N-linked | | | | | PKMHTVNGYVNRSLPGLIGCHRKSVYWHVIGMGTTPEVHSIFLEGHTFLVRNHRQASLEISPITFLTAQTLLMDLGQFLLFCHI |
| glycosylation | | | | | SSHQHDGMEAYVKVDSCPEEPQLRMKNNEEAEDYDDDLTDSEMDVVRFDDDNSPSFIQIRSVAKKHPKTWVHYIAAEEED |
| sites, and furin | | | | | WDYAPLVLAPDDRSYKSQYLNNGPQRIGRKYKKVRFMAYTDETFKTREAIQHESGILGPLLYGEVGDTLLIIFKNQASRPYNIYP |
| cleavage | | | | | HGITDVRPLYSRRLPKGVKHLKDFPILPGEIFKYKWTVTVEDGPTKSDPRCLTRYYSSFVNMERDLASGLIGPLLICYKESVDQR |
| site-amino acid | | | | | GNQIMSDKRNVILFSVFDENRSWYLTENIQRFLPNPAGVQLEDPEFQASNIMHSINGYVFDSLQLSVCLHEVAYWYILSIGAQ |
| sequence | | | | | TDFLSVFFSGYTFKHKMVYEDTLTLFPFSGETVFMSMENPGLWILGCHNSDFRNRGMTALLKVSSCDKNTGDYYEDSYEDISA |
| | | | | | YLLSKNNAIEPRSFSQNATNVSNNSNTSNDSNVSPPVLKRHQREITRTTLQSDQEEIDYDDTISVEMKKEDFDIYDEDENQSPR |
| | | | | | SFQKKTRHYFIAAVERLWDYGMSSSPHVLRNRAQSGSVPQFKKVVFQEFTDGSFTQPLYRGELNEHLGLLGPYIRAEVEDNI |
| | | | | | MVTFRNQASRPYSFYSSLISYEEDQRQGAEPRKNFVKPNETKTYFWKVQHHMAPTKDEFDCKAWAYFSDVDLEKDVHSGLI |
| | | | | | GPLLVCHTNTLNPANGRQVTVQEFALFFTIFDETKSWYFTENMERNCRAPCNIQMEDPTFKENYRFHAINGYIMDTLPGLV |
| | | | | | MAQDQRIRWYLLSMGSNENIHSIHFSGHVFTVRKKEEYKMALYNLYPGVFETVEMLPSKAGIWRVECLIGEHLHAGMSTLFL |
| | | | | | VYSNKCQTPLGMASGHIRDFQITASGQYGQWAPKLARLHYSGSINAWSTKEPFSWIKVDLLAPMIIHGIKTQGARQKFSSLYI |
| | | | | | SQFIIMYSLDGKKWQTYRGNSTGTLMVFFGNVDSSGIKHNIFNPPIIARYIRLHPTHYSIRSTLRMELMGCDLNSCSMPLGME |
| | | | | | SKAISDAQITASSYFTNMFATWSPSKARLHLQGRSNAWRPQVNNPKEWLQVDFQKTMKVTGVTTQGVKSLLTSMYVKEELI |
| | | | | | SSSQDGHQWTLFFQNGKVKVFQGNQDSFTPVVNSLDPPLLTRYLRIHPQSWVHQIALRMEVLGCEAQDLY- |
| B domain-deleted | 5055 | US | 92 | 386 | atgcaaatagagctctccacctgcttctttctgtgattttgcgattctgctttagtgccaccagaagatactacctgggtgcagtggaact |
| (BDD) hFVIII with | | 9,050,318 | | | gtcatgggactatatgcaaagtgatctcggtgagctgcctgtggacgcaagatttcctcctagagtgccaaaatcttttccattcaacacc |
| SQ sequence | | B2 | | | tcagtcgtgtacaaaaagactctgtttgtagaattcacggatcacatttcaacatcgctaagccaaggccaccctggatgggtctgctagg |
| fused to Fc | | | | | tcctaccatccaggctgaggtttatgatacagtggtcattacacttaagaacatggcttcccatcctgtcagtcttcatgctgttggtgta |
| region | | | | | tcctactggaaagcttctgagggagctgaatatgatgatcagaccagtcaaagggagaaagaagatgataaagtcttccctggtggaagc |
| | | | | | catacatatgtctggcaggtcctgaaagagaatggtccaatggcctctgacccactgtgccttacctactcatatctttctcatgtggacc |
| | | | | | tggtaaaagacttgaattcaggcctcattggagccctactagtatgtagagaagggagtctggccaaggaaaagacacagaccttgcac |
| | | | | | aaatttatactactttttgctgtatttgatgaagggaaaagttggcactcagaaacaaagaactccttgatgcaggatagggatgctgcat |
| | | | | | ctgctcgggcctggcctaaaatgcacacagtcaatggttatgtaaacaggtctctgccaggtctgattggatgccacaggaaatcagtcta |
| | | | | | ttggcatgtgattggaatgggcaccactcctgaagtgcactcaatattcctcgaaggtcacacatttcttgtgaggaaccatcgccaggcg |
| | | | | | tccttggaaatctcgccaataactttccttactgctcaaacactcttgatggaccttggacagtttctactgttttgtcatatctcttccc |
| | | | | | accaacatgatggcatggaagcttatgtcaaagtagacagctgtccagaggaaccccaactacgaatgaaaaataatgaagaagcggaaga |
| | | | | | ctatgatgatgatcttactgattctgaaatggatgtggtcaggtttgatgatgacaactctccttcctttatccaaattcgctcagttgcc |
| | | | | | aagaagcatcctaaaacttgggtacattacattgctgctgaagaggaggactgggactatgctcccttagtcctcgcccccgatgacaga |
| | | | | | agttataaaagtcaatatttgaacaatggccctcagcggattggtaggaagtacaaaaaagtccgatttatggcatacacagatgaaacc |
| | | | | | tttaagactcgtgaagctattcagcatgaatcaggaatcttgggacctttactttatggggaagttggagacacactgttgattatattt |
| | | | | | aagaatcaagcaagcagaccatataacatctaccctcacggaatcactgatgtccgtcctttgtattcaaggagattaccaaaaggtgtaa |
| | | | | | aacatttgaaggattttccaattctgccaggagaaatattcaaatataaatggacagtgactgtagaagatgggccaactaaatcagatc |
| | | | | | ctcggtgcctgacccgctattactctagtttcgttaatatggagagagatctagcttcaggactcattggccctctcctcatctgctaca |
| | | | | | aagaatctgtagatcaaagaggaaaccagataatgtcagacaagaggaatgtcatcctgttttctgtatttgatgagaaccgaagctggt |
| | | | | | acctcacagagaatatacaacgctttctccccaatccagctggagtgcagcttgaggatccagagttccaagcctccaacatcatgcaca |
| | | | | | gcatcaatggctatgtttttgatagtttgcagttgtcagtttgtttgcatgaggtggcatactggtacattctaagcattggagcacaga |
| | | | | | ctgacttcctttctgtcttcttctctggatataccttcaaacacaaaatggtctatgaagacacactcaccctattcccattctcaggag |
| | | | | | aaactgtcttcatgtcgatggaaaacccaggtctatggattctggggtgccacaactcagactttcggaacagaggcatgaccgccttact |
| | | | | | gaaggtttctagttgtgacaagaacactggtgattattacgaggacagttatgaagatatttcagcatacttgctgagtaaaaacaatgc |
| | | | | | cattgaaccaagaagcttctctcaaaacccaccagtcttgaaacgccatcaacgggaaataactcgtactactcttcagtcagatcaagag |
| | | | | | gaaattgactatgatgataccatatcagttgaaatgaagaaggaagattttgacatttatgatgaggatgaaaatcagagcccccgcagct |
| | | | | | ttcaaaagaaaacacgacactattttattgctgcagtggagaggctctgggattatgggatgagtagctccccacatgttctaagaaacag |
| | | | | | ggctcagagtggcagtgtccctcagttcaagaaagttgttttccaggaatttactgatggctcctttactcagcccttataccgtggagaa |
| | | | | | ctaaatgaacatttgggactcctggggccatatataagagcagaagttgaagataatatcatggtaactttcagaaatcaggcctctcgt |
| | | | | | ccctattccttctattctagccttatttcttatgaggaagatcagaggcaaggagcagaacctagaaaaaactttgtcaagcctaatgaaa |
| | | | | | ccaaaacttacttttggaaagtgcaacatcatatggcacccactaaagatgagtttgactgcaaagcctgggcttatttctctgatgttga |
| | | | | | cctggaaaaagatgtgcactcaggcctgattggaccccttctggtctgccacactaacacactgaaccctgctcatgggagacaagtgaca |
| | | | | | gtacaggaatttgctctgtttttcaccatctttgatgagaccaaaagctggtacttcactgaaaatatggaaagaaactgcagggctccct |
| | | | | | gcaatatccagatggaagatcccacttttaaagagaattatcgcttccatgcaatcaatggctacataatggatacactacctggcttag |
| | | | | | taatggctcaggatcaaaggattcgatggtatctgctcagcatgggcagcaatgaaaacatccattctattcatttcagtggacatgtgtt |
| | | | | | cactgtacgaaaaaaagaggagtataaaatggcactgtacaatctctatccaggtgtttttgagacagtggaaatgttaccatccaaagc |
| | | | | | tggaatttggcgggtggaatgccttattggcgagcatctacatgctgggatgagcacactttttctggtgtacagcaataagtgtcagac |
| | | | | | tcccctgggaatggcttctggacacattagagattttcagattacagcttcaggacaatatggacagtgggccccaaagctggccagact |
| | | | | | tcattattccggatcaatcaatgcctggagcaccaaggagcccttttcttggatcaaggtggatctgttggcaccaatgattattcacggc |
| | | | | | atcaagacccagggtgcccgtcagaagttctccagcctctacatctctcagtttatcatcatgtatagtcttgatgggaagaagtggcag |
| | | | | | acttatcgaggaaattccactggaaccttaatggtcttctttggcaatgtggattcatctgggataaaacacaatatttttaaccctcca |
| | | | | | attattgctcgatacatccgtttgcacccaactcattatagcattcgcagcactcttcgcatggagttgatgggctgtgatttaaatagt |
| | | | | | tgcagcatgccattgggaatggagagtaaagcaatatcagatgcacagattactgcttcatcctactttaccaatatgtttgccacctgg |
| | | | | | tctccttcaaaagctcgacttcacctccaagggaggagtaatgcctggagacctcaggtgaataatccaaaagagtggctgcaagtggact |
| | | | | | tccagaagacaatgaaagtcacaggagtaactactcagggagtaaaatctctgcttaccagcatgtatgtgaaggagttcctcatctcca |
| | | | | | gcagtcaagatggccatcagtggactctcttttttcagaatggcaaagtaaaggtttttcagggaaatcaagactccttcacacctgtgg |
| | | | | | tgaactctctagacccaccgttactgactcgctaccttcgaattcacccccagagttgggtgcaccagattgccctgaggatggaggttct |
| | | | | | gggctgcgaggcacaggacctctacgacaaaactcacacatgcccaccgtgcccagctccagaactcctgggcggaccgtcagtcttcctc |
| | | | | | ttccccccaaaacccaaggacaccctcatgatctcccggacccctgaggtcacatgcgtggtggtggacgtgagccacgaagaccctgagg |
| | | | | | tcaagttcaactggtacgtggacggcgtggaggtgcataatgccaagacaaagccgcgggaggagcagtacaacagcacgtaccgtgtgg |
| | | | | | tcagcgtcctcaccgtcctgcaccaggactggctgaatggcaaggagtacaagtgcaaggtctccaacaaagccctcccagcccccatcga |
| | | | | | gaaaaccatctccaaagccaaagggcagccccgagaaccacaggtgtacaccctgcccccatcccgggatgagctgaccaagaaccaggtc |
| | | | | | agcctgacctgcctggtcaaaggcttctatcccagcgacatcgccgtggagtgggagagcaatgggcagccggagaacaactacaagacca |
| | | | | | cgcctcccgtgttggactccgacggctccttcttcctctacagcaagctcaccgtggacaagagcaggtggcagcaggggaacgtcttctc |
| | | | | | atgctccgtgatgcatgaggctctgcacaaccactacacgcagaagagcctctccctgtctccgggtaaa |
| B domain-deleted | 4374 | | 211 | 387 | ATGCAGATCGAGCTGTCTACCTGCTTCTTCCTGTGCCTGCTGCGGTTCTGCTTCAGCGCCACCAGAAGATATTACCTGGG |
| (BDD) | | | | | CGCCGTGGAACTGAGCTGGGACTACATGCAGTCTGACCTGGGAGAGCTGCCCGTGGACGCTAGATTTCCTCCAAGAGT |
| hEVIII with SQ | | | | | GCCCAAGAGCTTCCCCTTCAACACCTCCGTGGTGTACAAGAAAACCCTGTTCGTGGAATTCACCGACCACCTGTTCAATA |
| sequence | | | | | TCGCCAAGCCTCGGCCTCCTTGGATGGGACTGCTGGGACCTACAATTCAGGCCGAGGTGTACGACACCGTGGTCATCAC |
| (codop) | | | | | CCTGAAGAACATGGCCAGCCATCCTGTGTCTCTGCACGCCGTGGGAGTGTCTTATTGGAAGGCTTCTGAGGGCGCCGAG |
| | | | | | TACGACGATCAGACAAGCCAGAGAGAGAAAGAGGACGACAAGGTTTTCCCTGGCGGCAGCCACACCTATGTCTGGCAG |
| | | | | | GTCCTGAAAGAAAACGGCCCTATGGCCTCCGATCCTCTGTGCCTGACATACAGCTACCTGAGCCACGTGGACCTGGTCA |
| | | | | | AGGACCTGAATTCTGGCCTGATCGGAGCCCTGCTCGTGTGTAGAGAAGGCAGCCTGGCCAAAGAGAAAACCCAGACAC |
| | | | | | TGCACAAGTTCATCCTGCTGTTCGCCGTGTTCGACGAGGGCAAGAGCTGGCACAGCGAGACAAAGAACAGCCTGATGC |
| | | | | | AGGACAGGGATGCCGCCTCTGCTAGAGCTGGCCTAAGATGCACACCGTGAACGGCTACGTGAACAGAAGCCTGCCTG |
| | | | | | GACTGATCGGCTGCCACAGAAAGTCCGTGTACTGGCACGTGATCGGCATGGGCACAACACCTGAGGTGCACAGCATCT |
| | | | | | TTCTGGAAGGCCACACCTTCCTCGTGCGGAACCACAGACAGGCCAGCCTGGAAATCAGCCCTATCACCTTCCTGACCGCT |
| | | | | | CAGACCCTGCTGATGGATCTGGGCCAGTTTCTGCTGTTCTGCCACATCAGCTCCCACCAGCACGATGGCATGGAAGCCT |
| | | | | | ACGTGAAGGTGGACAGCTGCCCCGAAGAACCCCAGCTGCGGATGAAGAACAACGAGGAAGCCGAGGACTACGACGAC |
| | | | | | GACCTGACCGACTCTGAGATGGACGTCGTCAGATTCGACGACGATAACAGCCCCAGCTTCATCCAGATCAGAAGCGTGG |
| | | | | | CCAAGAAGCACCCCAAGACCTGGGTGCACTATATCGCCGCCGAGGAAGAGGACTGGGATTACGCTCCTCTGGTGCTGG |
| | | | | | CCCCTGACGACAGAAGCTACAAGAGCCAGTACCTGAACAACGGCCCTCAGCGGATCGGCCGGAAGTATAAGAAAGTGC |
| | | | | | GGTTCATGGCCTACACCGACGAGACATTCAAGACCAGAGAGGCCATCCAGCACGAGAGCGGAATTCTGGGCCCTCTGC |
| | | | | | TGTATGGCGAAGTGGGCGATACACTGCTGATCATCTTCAAGAACCAGGCCAGCAGACCCTACAACATCTACCCTCACGG |
| | | | | | CATCACCGATGTGCGGCCCCTGTATTCTAGAAGGCTGCCCAAGGGCGTGAAGCACCTGAAGGACTTCCCTATCCTGCCT |
| | | | | | GGCGAGATTTTCAAGTACAAGTGGACCGTGACCGTGGAAGATGGCCCCACCAAGAGCGACCCTAGATGTCTGACACGG |
| | | | | | TACTACAGCAGCTTCGTGAACATGGAACGCGACCTGGCCAGCGGCCTGATTGGACCTCTGCTGATCTGCTACAAAGAAA |
| | | | | | GCGTGGACCAGCGGGGCAACCAGATCATGAGCGACAAGCGGAACGTGATCCTGTTTAGCGTGTTCGATGAGAACCGGT |
| | | | | | CCTGGTATCTGACCGAGAACATCCAGCGGTTTCTGCCCAATCCTGCCGGGGTGCAACTGGAAGATCCTGAGTTCCAGGC |
| | | | | | AAGCAACATCATGCACTCCATCAATGGCTATGTGTTCGACAGCCTGCAGCTGAGCGTGTGCCTGCACGAAGTGGCCTAC |
| | | | | | TGGTACATCCTGAGCATTGGCGCCCAGACCGACTTCCTGTCCGTGTTCTTTAGCGGCTACACCTTCAAGCACAAGATGGT |
| | | | | | GTACGAGGATACCCTGACACTGTTCCCATTCAGCGGCGAGACAGTGTTCATGAGCATGGAAAACCCCGGCCTGTGGATT |
| | | | | | CTGGGCTGTCACAACAGCGACTTCCGGAACAGAGGCATGACAGCCCTGCTGAAGGTGTCCAGCTGCGACAAGAACACC |
| | | | | | GGCGACTACTACGAGGACAGCTATGAGGACATCAGCGCCTACCTGCTGAGCAAGAACAATGCCATCGAGCCTCGGAGC |
| | | | | | TTCAGCCAGAATCCTCCTGTGCTGAAGCGGCACCAGCGCGAGATCACCAGAACAACCCTGCAGAGCGACCAAGAGGAA |
| | | | | | ATCGATTACGACGACACCATCAGCGTCGAGATGAAGAAAGAAGATTTCGACATCTACGACGAGGACGAGAATCAGAGC |
| | | | | | CCCAGAAGCTTTCAGAAAAAGACCCGGCACTACTTCATTGCCGCCGTCGAGAGACTGTGGGACTACGGCATGTCTAGCA |
| | | | | | GCCCTCACGTGCTGAGAAATAGAGCCCAGAGCGGCAGCGTGCCCCAGTTCAAGAAAGTGGTGTTCCAAGAGTTCACCG |
| | | | | | ACGGCAGCTTCACCCAGCCACTGTATAGAGGCGAGCTGAACGAGCATCTGGGCCTGCTGGGCCCTTATATCAGAGCCG |
| | | | | | AAGTGGAAGATAACATCATGGTCACCTTCCGGAATCAGGCTAGCCGGCCTTACAGCTTCTACAGCTCCCTGATCAGCTAC |
| | | | | | GAAGAGGACCAGAGACAGGGCGCTGAGCCCAGAAAGAACTTCGTGAAGCCCAACGAGACTAAGACCTACTTTTGGAA |
| | | | | | GGTGCAGCACCACATGGCCCCTACAAAGGACGAGTTCGACTGCAAAGCCTGGGCCTACTTCTCCGATGTGGATCTGGAA |
| | | | | | AAGGACGTGCACAGCGGGCTCATCGGACCACTGCTTGTGTGCCACACCAACACACTGAACCCCGCTCACGGCAGACAA |
| | | | | | GTGACAGTGCAAGAGTTCGCCCTGTTCTTCACCATCTTCGACGAAACAAAGAGCTGGTACTTCACCGAGAATATGGAAC |
| | | | | | GGAACTGCAGAGCCCCTTGCAACATCCAGATGGAAGATCCCACCTTCAAAGAGAACTACCGGTTCCACGCCATCAACGG |
| | | | | | CTACATCATGGACACACTGCCCGGCCTGGTTATGGCCCAGGATCAGAGAATCCGGTGGTATCTGCTGTCCATGGGCTCC |
| | | | | | AACGAGAATATCCACAGCATCCACTTCAGCGGCCACGTGTTCACCGTGCGGAAAAAAGAAGAGTACAAAATGGCCCTG |
| | | | | | TACAATCTGTACCCTGGGGTGTTCGAAACCGTGGAAATGCTGCCTTCCAAGGCCGGCATTTGGAGAGTGGAATGTCTGA |
| | | | | | TTGGAGAGCACCTCCACGCCGGAATGAGCACCCTGTTTCTGGTGTACAGCAACAAGTGTCAGACCCCTCTCGGCATGGC |
| | | | | | CTCTGGACACATCAGAGACTTCCAGATCACCGCCTCTGGCCAGTACGGACAGTGGGCTCCTAAACTGGCTCGGCTGCAC |
| | | | | | TACAGCGGCAGCATCAATGCCTGGTCCACCAAAGAGCCCTTCAGCTGGATCAAGGTGGACCTGCTGGCTCCCATGATCA |
| | | | | | TCCACGGAATCAAGACCCAGGGCGCCAGACAGAAGTTCAGCAGCCTGTACATCAGCCAGTTCATCATCATGTACAGCCT |
| | | | | | GGACGGCAAGAAGTGGCAGACCTACAGAGGCAACAGCACCGGCACACTCATGGTGTTCTTCGGCAACGTGGACTCCAG |
| | | | | | CGGCATTAAGCACAACATCTTCAACCCTCCAATCATTGCCCGGTACATCCGGCTGCACCCCACACACTACAGCATCCGGT |
| | | | | | CTACCCTGAGAATGGAACTGATGGGCTGCGACCTGAACAGCTGCTCTATGCCCCTCGGAATGGAAAGCAAGGCCATCA |
| | | | | | GCGACGCCCAGATCACAGCCAGCAGCTACTTCACCAACATGTTCGCCACTTGGAGCCCCTCCAAGGCTAGACTGCATCT |
| | | | | | GCAGGGCAGAAGCAACGCTGGAGGCCCCAAGTGAACAACCCCAAAGAGTGGCTGCAGGTTGACTTTCAAAAGACCAT |
| | | | | | GAAAGTGACCGGCGTGACCACACAGGGCGTCAAGTCTCTGCTGACCTCTATGTACGTGAAAGAGTTCCTGATCTCCAGC |
| | | | | | AGCCAGGACGGCCATCAGTGGACCCTGTTTTTCCAGAACGGCAAAGTGAAAGTGTTCCAGGGCAATCAGGACAGCFTC |
| | | | | | ACACCCGTGGTCAATTCTCTGGACCCTCCACTGCTGACCAGATACCTGCGGATTCACCCTCAGTCTTGGGTGCACCAGAT |
| | | | | | CGCTCTGCGGATGGAAGTGCTGGGCTGTGAAGCTCAGGACCTCTACTAG |
| Jcat optimized B- | 4980 | | 350 | 388 | ATGCAGATCGAGCTGAGCACCTGCTTCTTCCTGTGCCTGCTGCGCTTCTGCTTCAGCGCCACCCGCCGCTACTACCTGGG |
| domain | | | | | CGCCGTGGAGCTGAGCTGGGACTACATGCAGAGCGACCTGGGCGAGCTGCCCGTGGACGCCCGCTTCCCCCCCCGCGT |
| truncated (206 | | | | | GCCCAAGAGCTTCCCCTTCAACACCAGCGTGGTGTACAAGAAGACCCTGTTCGTGGAGTTCACCGACCACCTGTTCAACA |
| amino acids | | | | | TCGCCAAGCCCCGCCCCCCCTGGATGGGCCTGCTGGGCCCCACCATCCAGGCCGAGGTGTACGACACCGTGGTGATCAC |
| remaining) Human | | | | | CCTGAAGAACATGGCCAGCCACCCCGTGAGCCTGCACGCCGTGGGCGTGAGCTACTGGAAGGCCAGCGAGGGCGCCG |
| Factor VIII | | | | | AGTACGACGACCAGACCAGCCAGCGCGAGAAGGAGGACGACAAGGTGTTCCCCGGCGGCAGCCACACCTACGTGTGG |
| ORF (BDD-206) | | | | | CAGGTGCTGAAGGAGAACGGCCCCATGGCCAGCGACCCCCTGTGCCTGACCTACAGCTACCTGAGCCACGTGGACCTG |
| | | | | | GTGAAGGACCTGAACAGCGGCCTGATCGGCGCCCTGCTGGTGTGCCGCGAGGGCAGCCTGGCCAAGGAGAAGACCCA |
| | | | | | GACCCTGCACAAGTTCATCCTGCTGTTCGCCGTGTTCGACGAGGGCAAGAGCTGGCACAGCGAGACCAAGAACAGCCT |
| | | | | | GATGCAGGACCGCGACGCCGCCAGCGCCCGCGCCTGGCCCAAGATGCACACCGTGAACGGCTACGTGAACCGCAGCCT |
| | | | | | GCCCGGCCTGATCGGCTGCCACCGCAAGAGCGTGTACTGGCACGTGATCGGCATGGGCACCACCCCCGAGGTGCACAG |
| | | | | | CATCTTCCTGGAGGGCCACACCTTCCTGGTGCGCAACCACCGCCAGGCCAGCCTGGAGATCAGCCCCATCACCTTCCTGA |
| | | | | | CCGCCCAGACCCTGCTGATGGACCTGGGCCAGTTCCTGCTGTTCTGCCACATCAGCAGCCACCAGCACGACGGCATGGA |
| | | | | | GGCCTACGTGAAGGTGGACAGCTGCCCCGAGGAGCCCCAGCTGCGCATGAAGAACAACGAGGAGGCCGAGGACTACG |
| | | | | | ACGACGACCTGACCGACAGCGAGATGGACGTGGTGCGCTTCGACGACGACAACAGCCCCAGCTTCATCCAGATCCGCA |
| | | | | | GCGTGGCCAAGAAGCACCCCAAGACCTGGGTGCACTACATCGCCGCCGAGGAGGAGGACTGGGACTACGCCCCCCTG |
| | | | | | GTGCTGGCCCCCGACGACCGCAGCTACAAGAGCCAGTACCTGAACAACGGCCCCCAGCGCATCGGCCGCAAGTACAAG |
| | | | | | AAGGTGCGCTTCATGGCCTACACCGACGAGACCTTCAAGACCCGCGAGGCCATCCAGCACGAGAGCGGCATCCTGGGC |
| | | | | | CCCCTGCTGTACGGCGAGGTGGGCGACACCCTGCTGATCATCTTCAAGAACCAGGCCAGCCGCCCCTACAACATCTACC |
| | | | | | CCCACGGCATCACCGACGTGCGCCCCCTGTACAGCCGCCGCCTGCCCAAGGGCGTGAAGCACCTGAAGGACTTCCCCAT |
| | | | | | CCTGCCCGGCGAGATCTTCAAGTACAAGTGGACCGTGACCGTGGAGGACGGCCCCACCAAGAGCGACCCCCGCTGCCT |
| | | | | | GACCCGCTACTACAGCAGCTTCGTGAACATGGAGCGCGACCTGGCCAGCGGCCTGATCGGCCCCCTGCTGATCTGCTAC |
| | | | | | AAGGAGAGCGTGGACCAGCGCGGCAACCAGATCATGAGCGACAAGCGCAACGTGATCCTGTTCAGCGTGTTCGACGA |
| | | | | | GAACCGCAGCTGGTACCTGACCGAGAACATCCAGCGCTTCCTGCCCAACCCCGCCGGCGTGCAGCTGGAGGACCCCGA |
| | | | | | GTTCCAGGCCAGCAACATCATGCACAGCATCAACGGCTACGTGTTCGACAGCCTGCAGCTGAGCGTGTGCCTGCACGAG |
| | | | | | GTGGCCTACTGGTACATCCTGAGCATCGGCGCCCAGACCGACTTCCTGAGCGTGTTCTTCAGCGGCTACACCTTCAAGCA |
| | | | | | CAAGATGGTGTACGAGGACACCCTGACCCTGTTCCCCTTCAGCGGCGAGACCGTGTTCATGAGCATGGAGAACCCCGGC |
| | | | | | CTGTGGATCCTGGGCTGCCACAACAGCGACTTCCGCAACCGCGGCATGACCGCCCTGCTGAAGGTGAGCAGCTGCGAC |
| | | | | | AAGAACACCGGCGACTACTACGAGGACAGCTACGAGGACATCAGCGCCTACCTGCTGAGCAAGAACAACGCCATCGAG |
| | | | | | CCCCGCAGCTTCAGCCAGAACAGCCGCCACCCCAGCACCCGCCAGAAGCAGTTCAACGCCACCACCATCCCCGAGAACG |
| | | | | | ACATCGAGAAGACCGACCCCTGGTTCGCCCACCGCACCCCCATGCCCAAGATCCAGAACGTGAGCAGCAGCGACCTGCT |
| | | | | | GATGCTGCTGCGCCAGAGCCCCACCCCCCACGGCCTGAGCCTGAGCGACCTGCAAGAGGCCAAGTACGAGACCTTCAG |
| | | | | | CGACGACCCCAGCCCCGGCGCCATCGACAGCAACAACAGCCTGAGCGAGATGACCCACTTCCGCCCCCAGCTGCACCAC |
| | | | | | AGCGGCGACATGGTGTTCACCCCCGAGAGCGGCCTGCAGCTGCGCCTGAACGAGAAGCTGGGCACCACCGCCGCCACC |
| | | | | | GAGCTGAAGAAGCTGGACTTCAAGGTGAGCAGCACCAGCAACAACCTGATCAGCACCATCCCCAGCGACAACCTGGCC |
| | | | | | GCCGGCACCGACAACACCAGCAGCCTGGGCCCCCCCAGCATGCCCGTGCACTACGACAGCCAGCTGGACACCACCCTGT |
| | | | | | TCGGCAAGAAGAGCAGCCCCCTGACCGAGAGCGGCGGCCCCCTGAGCCTGAGCGAGGAGAACAACGACAGCAAGCTG |
| | | | | | CCCCCCGTGCTGAAGCGCCACCAGCGCGAGATCACCCGCACCACCCTGCAGAGCGACCAGGAGGAGATCGACTACGAC |
| | | | | | GACACCATCAGCGTGGAGATGAAGAAGGAGGACTTCGACATCTACGACGAGGACGAGAACCAGAGCCCCCGCAGCTT |
| | | | | | CCAGAAGAAGACCCGCCACTACTTCATCGCCGCCGTGGAGCGCCTGTGGGACTACGGCATGAGCAGCAGCCCCCACGT |
| | | | | | GCTGCGCAACCGCGCCCAGAGCGGCAGCGTGCCCCAGTTCAAGAAGGTGGTGTTCCAGGAGTTCACCGACGGCAGCTT |
| | | | | | CACCCAGCCCCTGTACCGCGGCGAGCTGAACGAGCACCTGGGCCTGCTGGGCCCCTACATCCGCGCCGAGGTGGAGGA |
| | | | | | CAACATCATGGTGACCTTCCGCAACCAGGCCAGCCGCCCCTACAGCTTCTACAGCAGCCTGATCAGCTACGAGGAGGAC |
| | | | | | CAGCGCCAGGGCGCCGAGCCCCGCAAGAACTTCGTGAAGCCCAACGAGACCAAGACCTACTTCTGGAAGGTGCAGCAC |
| | | | | | CACATGGCCCCCACCAAGGACGAGTTCGACTGCAAGGCCTGGGCCTACTTCAGCGACGTGGACCTGGAGAAGGACGTG |
| | | | | | CACAGCGGCCTGATCGGCCCCCTGCTGGTGTGCCACACCAACACCCTGAACCCCGCCCACGGCCGCCAGGTGACCGTGC |
| | | | | | AGGAGTTCGCCCTGTTCTTCACCATCTTCGACGAGACCAAGAGCTGGTACTTCACCGAGAACATGGAGCGCAACTGCCG |
| | | | | | CGCCCCCTGCAACATCCAGATGGAGGACCCCACCTTCAAGGAGAACTACCGCTTCCACGCCATCAACGGCTACATCATG |
| | | | | | GACACCCTGCCCGGCCTGGTGATGGCCCAGGACCAGCGCATCCGCTGGTACCTGCTGAGCATGGGCAGCAACGAGAAC |
| | | | | | ATCCACAGCATCCACTTCAGCGGCCACGTGTTCACCGTGCGCAAGAAGGAGGAGTACAAGATGGCCCTGTACAACCTGT |
| | | | | | ACCCCGGCGTGTTCGAGACCGTGGAGATGCTGCCCAGCAAGGCCGGCATCTGGCGCGTGGAGTGCCTGATCGGCGAG |
| | | | | | CACCTGCACGCCGGCATGAGCACCCTGTTCCTGGTGTACAGCAACAAGTGCCAGACCCCCCTGGGCATGGCCAGCGGCC |
| | | | | | ACATCCGCGACTTCCAGATCACCGCCAGCGGCCAGTACGGCCAGTGGGCCCCCAAGCTGGCCCGCCTGCACTACAGCG |
| | | | | | GCAGCATCAACGCCTGGAGCACCAAGGAGCCCTTCAGCTGGATCAAGGTGGACCTGCTGGCCCCCATGATCATCCACG |
| | | | | | GCATCAAGACCCAGGGCGCCCGCCAGAAGTTCAGCAGCCTGTACATCAGCCAGTTCATCATCATGTACAGCCTGGACGG |
| | | | | | CAAGAAGTGGCAGACCTACCGCGGCAACAGCACCGGCACCCTGATGGTGTTCTTCGGCAACGTGGACAGCAGCGGCAT |
| | | | | | CAAGCACAACATCTTCAACCCCCCCATCATCGCCCGCTACATCCGCCTGCACCCCACCCACTACAGCATCCGCAGCACCCT |
| | | | | | GCGCATGGAGCTGATGGGCTGCGACCTGAACAGCTGCAGCATGCCCCTGGGCATGGAGAGCAAGGCCATCAGCGACG |
| | | | | | CCCAGATCACCGCCAGCAGCTACTTCACCAACATGTTCGCCACCTGGAGCCCCAGCAAGGCCCGCCTGCACCTGCAAGG |
| | | | | | CCGCAGCAACGCCTGGCGCCCCCAGGTGAACAACCCCAAGGAGTGGCTGCAGGTGGACTTCCAGAAGACCATGAAGGT |
| | | | | | GACCGGCGTGACCACCCAGGGCGTGAAGAGCCTGCTGACCAGCATGTACGTGAAGGAGTTCCTGATCAGCAGCAGCCA |
| | | | | | GGACGGCCACCAGTGGACCCTGTTCTTCCAGAACGGCAAGGTGAAGGTGTTCCAGGGCAACCAGGACAGCTTCACCCC |
| | | | | | CGTGGTGAACAGCCTGGACCCCCCCCTGCTGACCCGCTACCTGCGCATCCACCCCCAGAGCTGGGTGCACCAGATCGCC |
| | | | | | CTGCGCATGGAGGTGCTGGGCTGCGAGGCCCAGGACCTGTACTAA |
| Jcat optimized | 7056 | | 467 | 389 | ATGCAGATCGAGCTGAGCACCTGCTTCTTCCTGTGCCTGCTGCGCTTCTGCTTCAGCGCCACCCGCCGCTACTACCTGGG |
| Wild type | | | | | CGCCGTGGAGCTGAGCTGGGACTACATGCAGAGCGACCTGGGCGAGCTGCCCGTGGACGCCCGCTTCCCCCCCCGCGT |
| Human Factor | | | | | GCCCAAGAGCTTCCCCTTCAACACCAGCGTGGTGTACAAGAAGACCCTGTTCGTGGAGTTCACCGACCACCTGTTCAACA |
| VIII ORF | | | | | TCGCCAAGCCCCGCCCCCCCTGGATGGGCCTGCTGGGCCCCACCATCCAGGCCGAGGTGTACGACACCGTGGTGATCAC |
| | | | | | CCTGAAGAACATGGCCAGCCACCCCGTGAGCCTGCACGCCGTGGGCGTGAGCTACTGGAAGGCCAGCGAGGGCGCCG |
| | | | | | AGTACGACGACCAGACCAGCCAGCGCGAGAAGGAGGACGACAAGGTGTTCCCCGGCGGCAGCCACACCTACGTGTGG |
| | | | | | CAGGTGCTGAAGGAGAACGGCCCCATGGCCAGCGACCCCCTGTGCCTGACCTACAGCTACCTGAGCCACGTGGACCTG |
| | | | | | GTGAAGGACCTGAACAGCGGCCTGATCGGCGCCCTGCTGGTGTGCCGCGAGGGCAGCCTGGCCAAGGAGAAGACCCA |
| | | | | | GACCCTGCACAAGTTCATCCTGCTGTTCGCCGTGTTCGACGAGGGCAAGAGCTGGCACAGCGAGACCAAGAACAGCCT |
| | | | | | GATGCAGGACCGCGACGCCGCCAGCGCCCGCGCCTGGCCCAAGATGCACACCGTGAACGGCTACGTGAACCGCAGCCT |
| | | | | | GCCCGGCCTGATCGGCTGCCACCGCAAGAGCGTGTACTGGCACGTGATCGGCATGGGCACCACCCCCGAGGTGCACAG |
| | | | | | CATCTTCCTGGAGGGCCACACCTTCCTGGTGCGCAACCACCGCCAGGCCAGCCTGGAGATCAGCCCCATCACCTTCCTGA |
| | | | | | CCGCCCAGACCCTGCTGATGGACCTGGGCCAGTTCCTGCTGTTCTGCCACATCAGCAGCCACCAGCACGACGGCATGGA |
| | | | | | GGCCTACGTGAAGGTGGACAGCTGCCCCGAGGAGCCCCAGCTGCGCATGAAGAACAACGAGGAGGCCGAGGACTACG |
| | | | | | ACGACGACCTGACCGACAGCGAGATGGACGTGGTGCGCTTCGACGACGACAACAGCCCCAGCTTCATCCAGATCCGCA |
| | | | | | GCGTGGCCAAGAAGCACCCCAAGACCTGGGTGCACTACATCGCCGCCGAGGAGGAGGACTGGGACTACGCCCCCCTG |
| | | | | | GTGCTGGCCCCCGACGACCGCAGCTACAAGAGCCAGTACCTGAACAACGGCCCCCAGCGCATCGGCCGCAAGTACAAG |
| | | | | | AAGGTGCGCTTCATGGCCTACACCGACGAGACCTTCAAGACCCGCGAGGCCATCCAGCACGAGAGCGGCATCCTGGGC |
| | | | | | CCCCTGCTGTACGGCGAGGTGGGCGACACCCTGCTGATCATCTTCAAGAACCAGGCCAGCCGCCCCTACAACATCTACC |
| | | | | | CCCACGGCATCACCGACGTGCGCCCCCTGTACAGCCGCCGCCTGCCCAAGGGCGTGAAGCACCTGAAGGACTTCCCCAT |
| | | | | | CCTGCCCGGCGAGATCTTCAAGTACAAGTGGACCGTGACCGTGGAGGACGGCCCCACCAAGAGCGACCCCCGCTGCCT |
| | | | | | GACCCGCTACTACAGCAGCTTCGTGAACATGGAGCGCGACCTGGCCAGCGGCCTGATCGGCCCCCTGCTGATCTGCTAC |
| | | | | | AAGGAGAGCGTGGACCAGCGCGGCAACCAGATCATGAGCGACAAGCGCAACGTGATCCTGTTCAGCGTGTTCGACGA |
| | | | | | GAACCGCAGCTGGTACCTGACCGAGAACATCCAGCGCTTCCTGCCCAACCCCGCCGGCGTGCAGCTGGAGGACCCCGA |
| | | | | | GTTCCAGGCCAGCAACATCATGCACAGCATCAACGGCTACGTGTTCGACAGCCTGCAGCTGAGCGTGTGCCTGCACGAG |
| | | | | | GTGGCCTACTGGTACATCCTGAGCATCGGCGCCCAGACCGACTTCCTGAGCGTGTTCTTCAGCGGCTACACCTTCAAGCA |
| | | | | | CAAGATGGTGTACGAGGACACCCTGACCCTGTTCCCCTTCAGCGGCGAGACCGTGTTCATGAGCATGGAGAACCCCGGC |
| | | | | | CTGTGGATCCTGGGCTGCCACAACAGCGACTTCCGCAACCGCGGCATGACCGCCCTGCTGAAGGTGAGCAGCTGCGAC |
| | | | | | AAGAACACCGGCGACTACTACGAGGACAGCTACGAGGACATCAGCGCCTACCTGCTGAGCAAGAACAACGCCATCGAG |
| | | | | | CCCCGCAGCTTCAGCCAGAACAGCCGCCACCCCAGCACCCGCCAGAAGCAGTTCAACGCCACCACCATCCCCGAGAACG |
| | | | | | ACATCGAGAAGACCGACCCCTGGTTCGCCCACCGCACCCCCATGCCCAAGATCCAGAACGTGAGCAGCAGCGACCTGCT |
| | | | | | GATGCTGCTGCGCCAGAGCCCCACCCCCCACGGCCTGAGCCTGAGCGACCTGCAAGAGGCCAAGTACGAGACCTTCAG |
| | | | | | CGACGACCCCAGCCCCGGCGCCATCGACAGCAACAACAGCCTGAGCGAGATGACCCACTTCCGCCCCCAGCTGCACCAC |
| | | | | | AGCGGCGACATGGTGTTCACCCCCGAGAGCGGCCTGCAGCTGCGCCTGAACGAGAAGCTGGGCACCACCGCCGCCACC |
| | | | | | GAGCTGAAGAAGCTGGACTTCAAGGTGAGCAGCACCAGCAACAACCTGATCAGCACCATCCCCAGCGACAACCTGGCC |
| | | | | | GCCGGCACCGACAACACCAGCAGCCTGGGCCCCCCCAGCATGCCCGTGCACTACGACAGCCAGCTGGACACCACCCTGT |
| | | | | | TCGGCAAGAAGAGCAGCCCCCTGACCGAGAGCGGCGGCCCCCTGAGCCTGAGCGAGGAGAACAACGACAGCAAGCTG |
| | | | | | CTGGAGAGCGGCCTGATGAACAGCCAGGAGAGCAGCTGGGGCAAGAACGTGAGCAGCACCGAGAGCGGCAGGCTGT |
| | | | | | TCAAGGGCAAGCGCGCCCACGGCCCCGCCCTGCTGACCAAGGACAACGCCCTGTTCAAGGTGAGCATCAGCCTGCTGA |
| | | | | | AGACCAACAAGACCAGCAACAACAGCGCCACCAACCGCAAGACCCACATCGACGGCCCCAGCCTGCTGATCGAGAACA |
| | | | | | GCCCCAGCGTGTGGCAGAACATCCTGGAGAGCGACACCGAGTTCAAGAAGGTGACCCCCCTGATCCACGACCGCATGC |
| | | | | | TGATGGACAAGAACGCCACCGCCCTGCGCCTGAACCACATGAGCAACAAGACCACCAGCAGCAAGAACATGGAGATGG |
| | | | | | TGCAGCAGAAGAAGGAGGGCCCCATCCCCCCCGACGCCCAGAACCCCGACATGAGCTTCTTCAAGATGCTGTTCCTGCC |
| | | | | | CGAGAGCGCCCGCTGGATCCAGCGCACCCACGGCAAGAACAGCCTGAACAGCGGCCAGGGCCCCAGCCCCAAGCAGC |
| | | | | | TGGTGAGCCTGGGCCCCGAGAAGAGCGTGGAGGGCCAGAACTTCCTGAGCGAGAAGAACAAGGTGGTGGTGGGCAA |
| | | | | | GGGCGAGTTCACCAAGGACGTGGGCCTGAAGGAGATGGTGTTCCCCAGCAGCCGCAACCTGTTCCTGACCAACCTGGA |
| | | | | | CAACCTGCACGAGAACAACACCCACAACCAGGAGAAGAAGATCCAGGAGGAGATCGAGAAGAAGGAGACCCTGATCC |
| | | | | | AGGAGAACGTGGTGCTGCCCCAGATCCACACCGTGACCGGCACCAAGAACTTCATGAAGAACCTGTTCCTGCTGAGCAC |
| | | | | | CCGCCAGAACGTGGAGGGCAGCTACGACGGCGCCTACGCCCCCGTGCTGCAGGACTTCCGCAGCCTGAACGACAGCAC |
| | | | | | CAACCGCACCAAGAAGCACACCGCCCACTTCAGCAAGAAGGGCGAGGAGGAGAACCTGGAGGGCCTGGGCAACCAGA |
| | | | | | CCAAGCAGATCGTGGAGAAGTACGCCTGCACCACCCGCATCAGCCCCAACACCAGCCAGCAGAACTTCGTGACCCAGC |
| | | | | | GCAGCAAGCGCGCCCTGAAGCAGTTCCGCCTGCCCCTGGAGGAGACCGAGCTGGAGAAGCGCATCATCGTGGACGAC |
| | | | | | ACCAGCACCCAGTGGAGCAAGAACATGAAGCACCTGACCCCCAGCACCCTGACCCAGATCGACTACAACGAGAAGGAG |
| | | | | | AAGGGCGCCATCACCCAGAGCCCCCTGAGCGACTGCCTGACCCGCAGCCACAGCATCCCCCAGGCCAACCGCAGCCCCC |
| | | | | | TGCCCATCGCCAAGGTGAGCAGCTTCCCCAGCATCCGCCCCATCTACCTGACCCGCGTGCTGTTCCAGGACAACAGCAG |
| | | | | | CCACCTGCCCGCCGCCAGCTACCGCAAGAAGGACAGCGGCGTGCAGGAGAGCAGCCACTTCCTGCAAGGCGCCAAGAA |
| | | | | | GAACAACCTGAGCCTGGCCATCCTGACCCTGGAGATGACCGGCGACCAGCGCGAGGTGGGCAGCCTGGGCACCAGCG |
| | | | | | CCACCAACAGCGTGACCTACAAGAAGGTGGAGAACACCGTGCTGCCCAAGCCCGACCTGCCCAAGACCAGCGGCAAGG |
| | | | | | TGGAGCTGCTGCCCAAGGTGCACATCTACCAGAAGGACCTGTTCCCCACCGAGACCAGCAACGGCAGCCCCGGCCACCT |
| | | | | | GGACCTGGTGGAGGGCAGCCTGCTGCAGGGCACCGAGGGCGCCATCAAGTGGAACGAGGCCAACCGCCCCGGCAAG |
| | | | | | GTGCCCTTCCTGCGCGTGGCCACCGAGAGCAGCGCCAAGACCCCCAGCAAGCTGCTGGACCCCCTGGCCTGGGACAAC |
| | | | | | CACTACGGCACCCAGATCCCCAAGGAGGAGTGGAAGAGCCAGGAGAAGAGCCCCGAGAAGACCGCCTTCAAGAAGAA |
| | | | | | GGACACCATCCTGAGCCTGAACGCCTGCGAGAGCAACCACGCCATCGCCGCCATCAACGAGGGCCAGAACAAGCCCGA |
| | | | | | GATCGAGGTGACCTGGGCCAAGCAGGGCCGCACCGAGCGCCTGTGCAGCCAGAACCCCCCCGTGCTGAAGCGCCACCA |
| | | | | | GCGCGAGATCACCCGCACCACCCTGCAGAGCGACCAGGAGGAGATCGACTACGACGACACCATCAGCGTGGAGATGA |
| | | | | | AGAAGGAGGACTTCGACATCTACGACGAGGACGAGAACCAGAGCCCCCGCAGCTTCCAGAAGAAGACCCGCCACTACT |
| | | | | | TCATCGCCGCCGTGGAGCGCCTGTGGGACTACGGCATGAGCAGCAGCCCCCACGTGCTGCGCAACCGCGCCCAGAGCG |
| | | | | | GCAGCGTGCCCCAGTTCAAGAAGGTGGTGTTCCAGGAGTTCACCGACGGCAGCTTCACCCAGCCCCTGTACCGCGGCG |
| | | | | | AGCTGAACGAGCACCTGGGCCTGCTGGGCCCCTACATCCGCGCCGAGGTGGAGGACAACATCATGGTGACCTTCCGCA |
| | | | | | ACCAGGCCAGCCGCCCCTACAGCTTCTACAGCAGCCTGATCAGCTACGAGGAGGACCAGCGCCAGGGCGCCGAGCCCC |
| | | | | | GCAAGAACTTCGTGAAGCCCAACGAGACCAAGACCTACTTCTGGAAGGTGCAGCACCACATGGCCCCCACCAAGGACG |
| | | | | | AGTTCGACTGCAAGGCCTGGGCCTACTTCAGCGACGTGGACCTGGAGAAGGACGTGCACAGCGGCCTGATCGGCCCCC |
| | | | | | TGCTGGTGTGCCACACCAACACCCTGAACCCCGCCCACGGCCGCCAGGTGACCGTGCAGGAGTTCGCCCTGTTCTTCAC |
| | | | | | CATCTTCGACGAGACCAAGAGCTGGTACTTCACCGAGAACATGGAGCGCAACTGCCGCGCCCCCTGCAACATCCAGATG |
| | | | | | GAGGACCCCACCTTCAAGGAGAACTACCGCTTCCACGCCATCAACGGCTACATCATGGACACCCTGCCCGGCCTGGTGA |
| | | | | | TGGCCCAGGACCAGCGCATCCGCTGGTACCTGCTGAGCATGGGCAGCAACGAGAACATCCACAGCATCCACTTCAGCG |
| | | | | | GCCACGTGTTCACCGTGCGCAAGAAGGAGGAGTACAAGATGGCCCTGTACAACCTGTACCCCGGCGTGTTCGAGACCG |
| | | | | | TGGAGATGCTGCCCAGCAAGGCCGGCATCTGGCGCGTGGAGTGCCTGATCGGCGAGCACCTGCACGCCGGCATGAGC |
| | | | | | ACCCTGTTCCTGGTGTACAGCAACAAGTGCCAGACCCCCCTGGGCATGGCCAGCGGCCACATCCGCGACTTCCAGATCA |
| | | | | | CCGCCAGCGGCCAGTACGGCCAGTGGGCCCCCAAGCTGGCCCGCCTGCACTACAGCGGCAGCATCAACGCCTGGAGCA |
| | | | | | CCAAGGAGCCCTTCAGCTGGATCAAGGTGGACCTGCTGGCCCCCATGATCATCCACGGCATCAAGACCCAGGGCGCCC |
| | | | | | GCCAGAAGTTCAGCAGCCTGTACATCAGCCAGTTCATCATCATGTACAGCCTGGACGGCAAGAAGTGGCAGACCTACCG |
| | | | | | CGGCAACAGCACCGGCACCCTGATGGTGTTCTTCGGCAACGTGGACAGCAGCGGCATCAAGCACAACATCTTCAACCCC |
| | | | | | CCCATCATCGCCCGCTACATCCGCCTGCACCCCACCCACTACAGCATCCGCAGCACCCTGCGCATGGAGCTGATGGGCTG |
| | | | | | CGACCTGAACAGCTGCAGCATGCCCCTGGGCATGGAGAGCAAGGCCATCAGCGACGCCCAGATCACCGCCAGCAGCTA |
| | | | | | CTTCACCAACATGTTCGCCACCTGGAGCCCCAGCAAGGCCCGCCTGCACCTGCAAGGCCGCAGCAACGCCTGGCGCCCC |
| | | | | | CAGGTGAACAACCCCAAGGAGTGGCTGCAGGTGGACTTCCAGAAGACCATGAAGGTGACCGGCGTGACCACCCAGGG |
| | | | | | CGTGAAGAGCCTGCTGACCAGCATGTACGTGAAGGAGTTCCTGATCAGCAGCAGCCAGGACGGCCACCAGTGGACCCT |
| | | | | | GTTCTTCCAGAACGGCAAGGTGAAGGTGTTCCAGGGCAACCAGGACAGCTTCACCCCCGTGGTGAACAGCCTGGACCC |
| | | | | | CCCCCTGCTGACCCGCTACCTGCGCATCCACCCCCAGAGCTGGGTGCACCAGATCGCCCTGCGCATGGAGGTGCTGGGC |
| | | | | | TGCGAGGCCCAGGACCTGTACTAA |
| Jcat optimized B- | 4374 | | 307 | 390 | ATGCAGATCGAGCTGAGCACCTGCTTCTTCCTGTGCCTGCTGCGCTTCTGCTTCAGCGCCACCCGCCGCTACTACCTGGG |
| domain | | | | | CGCCGTGGAGCTGAGCTGGGACTACATGCAGAGCGACCTGGGCGAGCTGCCCGTGGACGCCCGCTTCCCCCCCCGCGT |
| deleted Human | | | | | GCCCAAGAGCTTCCCCTTCAACACCAGCGTGGTGTACAAGAAGACCCTGTTCGTGGAGTTCACCGACCACCTGTTCAACA |
| Factor VIII | | | | | TCGCCAAGCCCCGCCCCCCCTGGATGGGCCTGCTGGGCCCCACCATCCAGGCCGAGGTGTACGACACCGTGGTGATCAC |
| ORF | | | | | CCTGAAGAACATGGCCAGCCACCCCGTGAGCCTGCACGCCGTGGGCGTGAGCTACTGGAAGGCCAGCGAGGGCGCCG |
| | | | | | AGTACGACGACCAGACCAGCCAGCGCGAGAAGGAGGACGACAAGGTGTTCCCCGGCGGCAGCCACACCTACGTGTGG |
| | | | | | CAGGTGCTGAAGGAGAACGGCCCCATGGCCAGCGACCCCCTGTGCCTGACCTACAGCTACCTGAGCCACGTGGACCTG |
| | | | | | GTGAAGGACCTGAACAGCGGCCTGATCGGCGCCCTGCTGGTGTGCCGCGAGGGCAGCCTGGCCAAGGAGAAGACCCA |
| | | | | | GACCCTGCACAAGTTCATCCTGCTGTTCGCCGTGTTCGACGAGGGCAAGAGCTGGCACAGCGAGACCAAGAACAGCCT |
| | | | | | GATGCAGGACCGCGACGCCGCCAGCGCCCGCGCCTGGCCCAAGATGCACACCGTGAACGGCTACGTGAACCGCAGCCT |
| | | | | | GCCCGGCCTGATCGGCTGCCACCGCAAGAGCGTGTACTGGCACGTGATCGGCATGGGCACCACCCCCGAGGTGCACAG |
| | | | | | CATCTTCCTGGAGGGCCACACCTTCCTGGTGCGCAACCACCGCCAGGCCAGCCTGGAGATCAGCCCCATCACCTTCCTGA |
| | | | | | CCGCCCAGACCCTGCTGATGGACCTGGGCCAGTTCCTGCTGTTCTGCCACATCAGCAGCCACCAGCACGACGGCATGGA |
| | | | | | GGCCTACGTGAAGGTGGACAGCTGCCCCGAGGAGCCCCAGCTGCGCATGAAGAACAACGAGGAGGCCGAGGACTACG |
| | | | | | ACGACGACCTGACCGACAGCGAGATGGACGTGGTGCGCTTCGACGACGACAACAGCCCCAGCTTCATCCAGATCCGCA |
| | | | | | GCGTGGCCAAGAAGCACCCCAAGACCTGGGTGCACTACATCGCCGCCGAGGAGGAGGACTGGGACTACGCCCCCCTG |
| | | | | | GTGCTGGCCCCCGACGACCGCAGCTACAAGAGCCAGTACCTGAACAACGGCCCCCAGCGCATCGGCCGCAAGTACAAG |
| | | | | | AAGGTGCGCTTCATGGCCTACACCGACGAGACCTTCAAGACCCGCGAGGCCATCCAGCACGAGAGCGGCATCCTGGGC |
| | | | | | CCCCTGCTGTACGGCGAGGTGGGCGACACCCTGCTGATCATCTTCAAGAACCAGGCCAGCCGCCCCTACAACATCTACC |
| | | | | | CCCACGGCATCACCGACGTGCGCCCCCTGTACAGCCGCCGCCTGCCCAAGGGCGTGAAGCACCTGAAGGACTTCCCCAT |
| | | | | | CCTGCCCGGCGAGATCTTCAAGTACAAGTGGACCGTGACCGTGGAGGACGGCCCCACCAAGAGCGACCCCCGCTGCCT |
| | | | | | GACCCGCTACTACAGCAGCTTCGTGAACATGGAGCGCGACCTGGCCAGCGGCCTGATCGGCCCCCTGCTGATCTGCTAC |
| | | | | | AAGGAGAGCGTGGACCAGCGCGGCAACCAGATCATGAGCGACAAGCGCAACGTGATCCTGTTCAGCGTGTTCGACGA |
| | | | | | GAACCGCAGCTGGTACCTGACCGAGAACATCCAGCGCTTCCTGCCCAACCCCGCCGGCGTGCAGCTGGAGGACCCCGA |
| | | | | | GTTCCAGGCCAGCAACATCATGCACAGCATCAACGGCTACGTGTTCGACAGCCTGCAGCTGAGCGTGTGCCTGCACGAG |
| | | | | | GTGGCCTACTGGTACATCCTGAGCATCGGCGCCCAGACCGACTTCCTGAGCGTGTTCTTCAGCGGCTACACCTTCAAGCA |
| | | | | | CAAGATGGTGTACGAGGACACCCTGACCCTGTTCCCCTTCAGCGGCGAGACCGTGTTCATGAGCATGGAGAACCCCGGC |
| | | | | | CTGTGGATCCTGGGCTGCCACAACAGCGACTTCCGCAACCGCGGCATGACCGCCCTGCTGAAGGTGAGCAGCTGCGAC |
| | | | | | AAGAACACCGGCGACTACTACGAGGACAGCTACGAGGACATCAGCGCCTACCTGCTGAGCAAGAACAACGCCATCGAG |
| | | | | | CCCCGCAGCTTCAGCCAGAACCCCCCCGTGCTGAAGCGCCACCAGCGCGAGATCACCCGCACCACCCTGCAGAGCGACC |
| | | | | | AGGAGGAGATCGACTACGACGACACCATCAGCGTGGAGATGAAGAAGGAGGACTTCGACATCTACGACGAGGACGAG |
| | | | | | AACCAGAGCCCCCGCAGCTTCCAGAAGAAGACCCGCCACTACTTCATCGCCGCCGTGGAGCGCCTGTGGGACTACGGC |
| | | | | | ATGAGCAGCAGCCCCCACGTGCTGCGCAACCGCGCCCAGAGCGGCAGCGTGCCCCAGTTCAAGAAGGTGGTGTTCCAG |
| | | | | | GAGTTCACCGACGGCAGCTTCACCCAGCCCCTGTACCGCGGCGAGCTGAACGAGCACCTGGGCCTGCTGGGCCCCTACA |
| | | | | | TCCGCGCCGAGGTGGAGGACAACATCATGGTGACCTTCCGCAACCAGGCCAGCCGCCCCTACAGCTTCTACAGCAGCCT |
| | | | | | GATCAGCTACGAGGAGGACCAGCGCCAGGGCGCCGAGCCCCGCAAGAACTTCGTGAAGCCCAACGAGACCAAGACCT |
| | | | | | ACTTCTGGAAGGTGCAGCACCACATGGCCCCCACCAAGGACGAGTTCGACTGCAAGGCCTGGGCCTACTTCAGCGACGT |
| | | | | | GGACCTGGAGAAGGACGTGCACAGCGGCCTGATCGGCCCCCTGCTGGTGTGCCACACCAACACCCTGAACCCCGCCCA |
| | | | | | CGGCCGCCAGGTGACCGTGCAGGAGTTCGCCCTGTTCTTCACCATCTTCGACGAGACCAAGAGCTGGTACTTCACCGAG |
| | | | | | AACATGGAGCGCAACTGCCGCGCCCCCTGCAACATCCAGATGGAGGACCCCACCTTCAAGGAGAACTACCGCTTCCACG |
| | | | | | CCATCAACGGCTACATCATGGACACCCTGCCCGGCCTGGTGATGGCCCAGGACCAGCGCATCCGCTGGTACCTGCTGAG |
| | | | | | CATGGGCAGCAACGAGAACATCCACAGCATCCACTTCAGCGGCCACGTGTTCACCGTGCGCAAGAAGGAGGAGTACAA |
| | | | | | GATGGCCCTGTACAACCTGTACCCCGGCGTGTTCGAGACCGTGGAGATGCTGCCCAGCAAGGCCGGCATCTGGCGCGT |
| | | | | | GGAGTGCCTGATCGGCGAGCACCTGCACGCCGGCATGAGCACCCTGTTCCTGGTGTACAGCAACAAGTGCCAGACCCC |
| | | | | | CCTGGGCATGGCCAGCGGCCACATCCGCGACTTCCAGATCACCGCCAGCGGCCAGTACGGCCAGTGGGCCCCCAAGCT |
| | | | | | GGCCCGCCTGCACTACAGCGGCAGCATCAACGCCTGGAGCACCAAGGAGCCCTTCAGCTGGATCAAGGTGGACCTGCT |
| | | | | | GGCCCCCATGATCATCCACGGCATCAAGACCCAGGGCGCCCGCCAGAAGTTCAGCAGCCTGTACATCAGCCAGTTCATC |
| | | | | | ATCATGTACAGCCTGGACGGCAAGAAGTGGCAGACCTACCGCGGCAACAGCACCGGCACCCTGATGGTGTTCTTCGGC |
| | | | | | AACGTGGACAGCAGCGGCATCAAGCACAACATCTTCAACCCCCCCATCATCGCCCGCTACATCCGCCTGCACCCCACCCA |
| | | | | | CTACAGCATCCGCAGCACCCTGCGCATGGAGCTGATGGGCTGCGACCTGAACAGCTGCAGCATGCCCCTGGGCATGGA |
| | | | | | GAGCAAGGCCATCAGCGACGCCCAGATCACCGCCAGCAGCTACTTCACCAACATGTTCGCCACCTGGAGCCCCAGCAAG |
| | | | | | GCCCGCCTGCACCTGCAAGGCCGCAGCAACGCCTGGCGCCCCCAGGTGAACAACCCCAAGGAGTGGCTGCAGGTGGAC |
| | | | | | TTCCAGAAGACCATGAAGGTGACCGGCGTGACCACCCAGGGCGTGAAGAGCCTGCTGACCAGCATGTACGTGAAGGA |
| | | | | | GTTCCTGATCAGCAGCAGCCAGGACGGCCACCAGTGGACCCTGTTCTTCCAGAACGGCAAGGTGAAGGTGTTCCAGGG |
| | | | | | CAACCAGGACAGCTTCACCCCCGTGGTGAACAGCCTGGACCCCCCCCTGCTGACCCGCTACCTGCGCATCCACCCCCAGA |
| | | | | | GCTGGGTGCACCAGATCGCCCTGCGCATGGAGGTGCTGGGCTGCGAGGCCCAGGACCTGTACTAA |
| Human Full | 7056 | | 323 | 391 | ATGCAGATCGAGCTGTCTACCTGCTTCTTCCTGTGCCTGCTGCGGTTCTGCTTCAGCGCCACCAGAAGATATTACCTGGG |
| Length FVIII | | | | | CGCCGTGGAACTGAGCTGGGACTACATGCAGTCTGACCTGGGAGAGCTGCCCGTGGACGCTAGATTTCCTCCAAGAGT |
| ORF (codon | | | | | GCCCAAGAGCTTCCCCTTCAACACCTCCGTGGTGTACAAGAAAACCCTGTTCGTGGAATTCACCGACCACCTGTTCAATA |
| optimized) | | | | | TCGCCAAGCCTCGGCCTCCTTGGATGGGACTGCTGGGACCTACAATTCAGGCCGAGGTGTACGACACCGTGGTCATCAC |
| | | | | | CCTGAAGAACATGGCCAGCCATCCTGTGTCTCTGCACGCCGTGGGAGTGTCTTATTGGAAGGCTTCTGAGGGCGCCGAG |
| | | | | | TACGACGATCAGACAAGCCAGAGAGAGAAAGAGGACGACAAGGTTTTCCCTGGCGGCAGCCACACCTATGTCTGGCAG |
| | | | | | GTCCTGAAAGAAAACGGCCCTATGGCCTCCGATCCTCTGTGCCTGACATACAGCTACCTGAGCCACGTGGACCTGGTCA |
| | | | | | AGGACCTGAATTCTGGCCTGATCGGAGCCCTGCTCGTGTGTAGAGAAGGCAGCCTGGCCAAAGAGAAAACCCAGACAC |
| | | | | | TGCACAAGTTCATCCTGCTGTTCGCCGTGTTCGACGAGGGCAAGAGCTGGCACAGCGAGACAAAGAACAGCCTGATGC |
| | | | | | AGGACAGGGATGCCGCCTCTGCTAGAGCTGGCCTAAGATGCACACCGTGAACGGCTACGTGAACAGAAGCCTGCCTG |
| | | | | | GACTGATCGGCTGCCACAGAAAGTCCGTGTACTGGCACGTGATCGGCATGGGCACAACACCTGAGGTGCACAGCATCT |
| | | | | | TTCTGGAAGGCCACACCTTCCTCGTGCGGAACCACAGACAGGCCAGCCTGGAAATCAGCCCTATCACCTTCCTGACCGCT |
| | | | | | CAGACCCTGCTGATGGATCTGGGCCAGTTTCTGCTGTTCTGCCACATCAGCTCCCACCAGCACGATGGCATGGAAGCCT |
| | | | | | ACGTGAAGGTGGACAGCTGCCCCGAAGAACCCCAGCTGCGGATGAAGAACAACGAGGAAGCCGAGGACTACGACGAC |
| | | | | | GACCTGACCGACTCTGAGATGGACGTCGTCAGATTCGACGACGATAACAGCCCCAGCTTCATCCAGATCAGAAGCGTGG |
| | | | | | CCAAGAAGCACCCCAAGACCTGGGTGCACTATATCGCCGCCGAGGAAGAGGACTGGGATTACGCTCCTCTGGTGCTGG |
| | | | | | CCCCTGACGACAGAAGCTACAAGAGCCAGTACCTGAACAACGGCCCTCAGCGGATCGGCCGGAAGTATAAGAAAGTGC |
| | | | | | GGTTCATGGCCTACACCGACGAGACATTCAAGACCAGAGAGGCCATCCAGCACGAGAGCGGAATTCTGGGCCCTCTGC |
| | | | | | TGTATGGCGAAGTGGGCGATACACTGCTGATCATCTTCAAGAACCAGGCCAGCAGACCCTACAACATCTACCCTCACGG |
| | | | | | CATCACCGATGTGCGGCCCCTGTATTCTAGAAGGCTGCCCAAGGGCGTGAAGCACCTGAAGGACTTCCCTATCCTGCCT |
| | | | | | GGCGAGATTTTCAAGTACAAGTGGACCGTGACCGTGGAAGATGGCCCCACCAAGAGCGACCCTAGATGTCTGACACGG |
| | | | | | TACTACAGCAGCTTCGTGAACATGGAACGCGACCTGGCCAGCGGCCTGATTGGACCTCTGCTGATCTGCTACAAAGAAA |
| | | | | | GCGTGGACCAGCGGGGCAACCAGATCATGAGCGACAAGCGGAACGTGATCCTGTTTAGCGTGTTCGATGAGAACCGGT |
| | | | | | CCTGGTATCTGACCGAGAACATCCAGCGGTTTCTGCCCAATCCTGCCGGGGTGCAACTGGAAGATCCTGAGTTCCAGGC |
| | | | | | AAGCAACATCATGCACTCCATCAATGGCTATGTGTTCGACAGCCTGCAGCTGAGCGTGTGCCTGCACGAAGTGGCCTAC |
| | | | | | TGGTACATCCTGAGCATTGGCGCCCAGACCGACTTCCTGTCCGTGTTCTTTAGCGGCTACACCTTCAAGCACAAGATGGT |
| | | | | | GTACGAGGATACCCTGACACTGTTCCCATTCAGCGGCGAGACAGTGTTCATGAGCATGGAAAACCCCGGCCTGTGGATT |
| | | | | | CTGGGCTGTCACAACAGCGACTTCCGGAACAGAGGCATGACAGCCCTGCTGAAGGTGTCCAGCTGCGACAAGAACACC |
| | | | | | GGCGACTACTACGAGGACAGCTATGAGGACATCAGCGCCTACCTGCTGAGCAAGAACAATGCCATCGAGCCCAGAAGC |
| | | | | | TTCAGCCAGAATAGCAGACACCCCTCCACCAGACAGAAGCAGTTCAACGCCACAACAATCCCCGAGAACGACATCGAGA |
| | | | | | AAACCGATCCTTGGTTTGCCCACAGAACCCCTATGCCTAAGATCCAGAACGTGTCCTCCAGCGATCTGCTGATGCTCCTG |
| | | | | | AGACAGAGCCCTACACCTCACGGACTGAGCCTGTCCGATCTGCAAGAGGCCAAATACGAAACCTTCAGCGACGACCCTT |
| | | | | | CTCCTGGCGCCATCGACAGCAACAATAGCCTGAGCGAGATGACCCACTTCAGACCACAGCTGCACCACAGCGGCGACAT |
| | | | | | GGTGTTTACACCTGAGAGCGGCCTCCAGCTGAGACTGAATGAGAAGCTGGGAACCACCGCCGCCACCGAGCTGAAGAA |
| | | | | | ACTGGACTTCAAGGTGTCCTCTACCAGCAACAACCTGATCAGCACAATCCCCTCCGACAACCTGGCTGCCGGCACCGACA |
| | | | | | ACACATCTTCTCTGGGCCCACCTAGCATGCCCGTGCACTACGATAGCCAGCTGGATACCACACTGTTCGGCAAGAAGTCT |
| | | | | | AGCCCTCTGACAGAGTCTGGCGGCCCTCTGTCTCTGAGCGAGGAAAACAACGACAGCAAGCTGCTGGAATCCGGCCTG |
| | | | | | ATGAACAGCCAAGAGTCCTCCTGGGGCAAGAATGTGTCCAGCACCGAGTCCGGCAGACTGTTCAAGGGAAAGAGAGCC |
| | | | | | CACGGACCTGCTCTGCTGACCAAGGATAACGCCCTGTTCAAAGTGTCCATCAGCCTGCTCAAGACCAACAAGACCTCCA |
| | | | | | ACAACTCCGCCACCAACAGAAAGACCCACATCGACGGCCCTAGCCTGCTGATCGAGAATAGCCCTAGCGTCTGGCAGAA |
| | | | | | TATCCTGGAAAGCGACACCGAGTTCAAGAAAGTGACCCCTCTGATCCACGACCGGATGCTCATGGACAAGAACGCCACC |
| | | | | | GCTCTGCGGCTGAACCACATGAGCAACAAGACAACCAGCAGCAAGAATATGGAAATGGTGCAGCAGAAGAAAGAGGG |
| | | | | | CCCCATTCCTCCAGACGCTCAGAACCCCGATATGAGCTTCTTCAAGATGCTCTTTCTGCCCGAGAGCGCCCGGTGGATTC |
| | | | | | AGAGAACACACGGCAAGAACTCCCTGAACTCCGGCCAGGGACCTTCTCCAAAGCAGCTGGTTTCCCTGGGACCTGAGA |
| | | | | | AGTCCGTGGAAGGACAGAACTTCCTGAGCGAAAAGAACAAAGTGGTCGTCGGCAAGGGCGAGTTCACCAAGGATGTG |
| | | | | | GGCCTGAAAGAGATGGTCTTTCCCAGCAGCCGGAACCTGTTCCTGACCAACCTGGACAACCTGCACGAGAACAACACCC |
| | | | | | ACAATCAAGAGAAGAAGATCCAAGAGGAAATCGAAAAGAAAGAGACACTCATCCAAGAGAACGTGGTGCTGCCTCAG |
| | | | | | ATCCACACAGTGACCGGCACCAAGAACTTTATGAAGAATCTGTTCCTGCTGAGTACCCGGCAGAACGTGGAAGGCAGCT |
| | | | | | ACGATGGCGCTTATGCCCCTGTGCTGCAGGACTTCAGATCCCTGAACGACTCCACCAATCGGACAAAGAAGCACACAGC |
| | | | | | CCACTTCTCCAAGAAGGGCGAAGAAGAGAACCTGGAAGGACTGGGCAATCAGACCAAGCAGATCGTCGAGAAGTACG |
| | | | | | CCTGCACCACCAGAATCAGCCCCAACACAAGCCAGCAGAACTTCGTGACCCAGCGGAGCAAAAGAGCCCTGAAGCAGT |
| | | | | | TCGGCTGCCCCTGGAAGAAACCGAGCTGGAAAAGCGGATCATCGTGGACGACACCAGCACACAGTGGTCCAAGAACA |
| | | | | | TGAAGCACTTGACCCCTAGCACACTGACCCAGATCGACTACAACGAGAAAGAGAAGGGCGCTATCACACAGAGCCCAC |
| | | | | | TGAGCGACTGTCTGACCAGAAGCCACAGCATCCCTCAGGCCAACAGATCCCCTCTGCCAATCGCCAAAGTGTCTAGCTTC |
| | | | | | CCCAGCATCAGACCCATCTACCTGACCAGAGTGCTGTTCCAGGACAACAGCAGCCATCTGCCAGCCGCCAGCTACCGGA |
| | | | | | AGAAAGATTCTGGCGTGCAAGAGAGCAGCCACTTTCTGCAGGGCGCTAAGAAGAACAATCTGAGCCTGGCTATTCTGA |
| | | | | | CCCTGGAAATGACCGGCGATCAGAGAGAAGTCGGCTCTCTGGGCACCAGCGCCACAAATAGCGTGACCTACAAAAAGG |
| | | | | | TGGAAAACACCGTGCTGCCTAAGCCTGACCTGCCAAAGACAAGCGGCAAGGTGGAACTGCTGCCAAAGGTGCACATCT |
| | | | | | ACCAGAAGGACCTGTTTCCTACCGAGACAAGCAACGGCTCTCCCGGCCATCTGGATCTGGTGGAAGGATCTCTGCTGCA |
| | | | | | GGGAACCGAGGGCGCCATCAAGTGGAACGAGGCCAATAGACCTGGCAAGGTGCCCTTCCTGAGAGTGGCCACAGAGT |
| | | | | | CCAGCGCCAAGACACCCTCTAAACTGCTGGACCCTCTGGCCTGGGACAACCACTATGGCACTCAGATCCCCAAAGAGGA |
| | | | | | ATGGAAGTCCCAAGAGAAGTCCCCTGAAAAGACCGCCTTCAAGAAGAAGGACACCATTCTGTCCCTGAATGCCTGCGA |
| | | | | | GAGCAACCACGCCATTGCCGCCATCAATGAGGGCCAGAACAAGCCCGAGATCGAAGTGACCTGGGCCAAGCAGGGAA |
| | | | | | GAACCGAGAGACTGTGTAGCCAGAATCCTCCTGTGCTGAAGCGGCACCAGAGAGAAATCACCCGGACCACACTGCAGA |
| | | | | | GCGACCAAGAAGAGATCGATTACGACGATACCATCAGCGTCGAGATGAAGAAAGAAGATTTCGACATCTACGACGAGG |
| | | | | | ACGAGAATCAGAGCCCTCGGAGCTTCCAGAAGAAAACCAGGCACTACTTTATTGCCGCCGTCGAGCGGCTGTGGGACT |
| | | | | | ACGGAATGTCTAGCTCTCCTCACGTGCTGCGGAATAGAGCCCAGTCTGGTAGCGTGCCCCAGTTCAAAAAGGTCGTGTT |
| | | | | | CCAAGAGTTCACCGACGGCAGCTTCACCCAGCCACTGTATAGAGGCGAGCTGAACGAGCATCTGGGCCTGCTGGGCCC |
| | | | | | TTATATCAGAGCCGAAGTGGAAGATAACATCATGGTCACCTTCCGGAATCAGGCTAGCCGGCCTTACAGCTTCTACAGC |
| | | | | | TCCCTGATCTCCTACGAAGAGGACCAGAGACAGGGCGCAGAGCCCCGGAAGAATTTCGTGAAGCCCAACGAGACTAAG |
| | | | | | ACCTACTTTTGGAAGGTGCAGCACCATATGGCCCCTACAAAGGACGAGTTCGACTGCAAAGCCTGGGCCTACTTCTCCG |
| | | | | | ATGTGGACCTCGAAAAGGACGTGCACAGCGGACTCATCGGCCCACTGCTTGTGTGCCACACCAACACACTGAACCCCGC |
| | | | | | TCACGGCAGACAAGTGACAGTGCAAGAGTTCGCCCTGTTTTTCACCATCTTCGACGAAACGAAGTCCTGGTACTTCACCG |
| | | | | | AAAACATGGAAAGAAACTGCAGGGCCCCTTGCAACATTCAGATGGAAGATCCCACCTTCAAAGAGAACTACCGGTTCCA |
| | | | | | CGCCATCAACGGCTACATCATGGACACACTGCCCGGCCTGGTTATGGCCCAGGATCAGAGAATCCGGTGGTATCTGCTG |
| | | | | | TCCATGGGCTCCAACGAGAATATCCACTCCATCCACTTCAGCGGCCACGTGTTCACCGTGCGGAAAAAAGAAGAGTACA |
| | | | | | AAATGGCCCTGTACAATCTGTACCCTGGGGTGTTCGAAACCGTTGAGATGCTGCCTAGCAAGGCCGGAATTTGGAGAGT |
| | | | | | GGAATGTCTGATTGGAGAGCACCTCCACGCCGGGATGAGCACCCTGTTTCTGGTGTACTCCAACAAGTGTCAGACCCCT |
| | | | | | CTCGGCATGGCCTCTGGCCACATTAGAGACTTCCAGATCACCGCCAGCGGACAGTATGGACAGTGGGCCCCTAAACTGG |
| | | | | | CCAGACTGCACTACTCCGGCAGCATCAATGCCTGGTCCACCAAAGAGCCTTTCAGCTGGATCAAAGTGGACCTGCTGGC |
| | | | | | TCCCATGATCATCCACGGAATCAAGACCCAGGGCGCCAGACAAAAGTTCAGCAGCCTGTACATCAGCCAGTTCATCATC |
| | | | | | ATGTACAGCCTGGACGGAAAGAAGTGGCAGACCTACCGGGGCAATAGCACCGGCACACTGATGGTGTTCTTCGGCAAC |
| | | | | | GTGGACTCCAGCGGCATTAAGCACAACATCTTCAACCCTCCAATCATTGCCCGGTACATCCGGCTGCACCCCACACACTA |
| | | | | | CAGCATCAGGTCTACCCTGAGAATGGAACTGATGGGCTGCGACCTGAACAGCTGCTCTATGCCCCTCGGAATGGAAAGC |
| | | | | | AAGGCCATCAGCGACGCCCAGATCACAGCCTCTAGCTACTTCACCAACATGTTCGCCACTTGGAGCCCCTCTAAGGCCCG |
| | | | | | GCTTCATCTGCAAGGCAGAAGCAACGCTTGGAGGCCCCAAGTGAACAACCCCAAAGAATGGCTCCAGGTGGACTTTCA |
| | | | | | GAAAACCATGAAAGTGACAGGCGTGACCACACAGGGCGTCAAGTCCCTGCTGACCTCTATGTACGTGAAAGAGTTTCTG |
| | | | | | ATCAGCTCCAGCCAGGACGGCCACCAGTGGACCCTGTTCTTCCAGAACGGCAAAGTGAAAGTGTTCCAGGGAAATCAG |
| | | | | | GACAGCTTCACACCCGTGGTCAATAGTCTGGACCCACCACTGCTGACCCGCTACCTGCGAATTCACCCTCAGTCTTGGGT |
| | | | | | GCACCAGATTGCCCTGCGGATGGAAGTGCTGGGCTGTGAAGCTCAGGACCTCTACTAG |
| Codon Optimized | 4980 | | 241 | 392 | ATGCAGATCGAGCTGTCTACCTGCTTCTTCCTGTGCCTGCTGCGGTTCTGCTTCAGCGCCACCAGAAGATATTACCTGGG |
| Human Factor | | | | | CGCCGTGGAACTGAGCTGGGACTACATGCAGTCTGACCTGGGAGAGCTGCCCGTGGACGCTAGATTTCCTCCAAGAGT |
| VIII 206- | | | | | GCCCAAGAGCTTCCCCTTCAACACCTCCGTGGTGTACAAGAAAACCCTGTTCGTGGAATTCACCGACCACCTGTTCAATA |
| variant ORF | | | | | TCGCCAAGCCTCGGCCTCCTTGGATGGGACTGCTGGGACCTACAATTCAGGCCGAGGTGTACGACACCGTGGTCATCAC |
| | | | | | CCTGAAGAACATGGCCAGCCATCCTGTGTCTCTGCACGCCGTGGGAGTGTCTTATTGGAAGGCTTCTGAGGGCGCCGAG |
| | | | | | TACGACGATCAGACAAGCCAGAGAGAGAAAGAGGACGACAAGGTTTTCCCTGGCGGCAGCCACACCTATGTCTGGCAG |
| | | | | | GTCCTGAAAGAAAACGGCCCTATGGCCTCCGATCCTCTGTGCCTGACATACAGCTACCTGAGCCACGTGGACCTGGTCA |
| | | | | | AGGACCTGAATTCTGGCCTGATCGGAGCCCTGCTCGTGTGTAGAGAAGGCAGCCTGGCCAAAGAGAAAACCCAGACAC |
| | | | | | TGCACAAGTTCATCCTGCTGTTCGCCGTGTTCGACGAGGGCAAGAGCTGGCACAGCGAGACAAAGAACAGCCTGATGC |
| | | | | | AGGACAGGGATGCCGCCTCTGCTAGAGCTTGGCCTAAGATGCACACCGTGAACGGCTACGTGAACAGAAGCCTGCCTG |
| | | | | | GACTGATCGGCTGCCACAGAAAGTCCGTGTACTGGCACGTGATCGGCATGGGCACAACACCTGAGGTGCACAGCATCT |
| | | | | | TTCTGGAAGGCCACACCTTCCTCGTGCGGAACCACAGACAGGCCAGCCTGGAAATCAGCCCTATCACCTTCCTGACCGCT |
| | | | | | CAGACCCTGCTGATGGATCTGGGCCAGTTTCTGCTGTTCTGCCACATCAGCTCCCACCAGCACGATGGCATGGAAGCCT |
| | | | | | ACGTGAAGGTGGACAGCTGCCCCGAAGAACCCCAGCTGCGGATGAAGAACAACGAGGAAGCCGAGGACTACGACGAC |
| | | | | | GACCTGACCGACTCTGAGATGGACGTCGTCAGATTCGACGACGATAACAGCCCCAGCTTCATCCAGATCAGAAGCGTGG |
| | | | | | CCAAGAAGCACCCCAAGACCTGGGTGCACTATATCGCCGCCGAGGAAGAGGACTGGGATTACGCTCCTCTGGTGCTGG |
| | | | | | CCCCTGACGACAGAAGCTACAAGAGCCAGTACCTGAACAACGGCCCTCAGCGGATCGGCCGGAAGTATAAGAAAGTGC |
| | | | | | GGTTCATGGCCTACACCGACGAGACATTCAAGACCAGAGAGGCCATCCAGCACGAGAGCGGAATTCTGGGCCCTCTGC |
| | | | | | TGTATGGCGAAGTGGGCGATACACTGCTGATCATCTTCAAGAACCAGGCCAGCAGACCCTACAACATCTACCCTCACGG |
| | | | | | CATCACCGATGTGCGGCCCCTGTATTCTAGAAGGCTGCCCAAGGGCGTGAAGCACCTGAAGGACTTCCCTATCCTGCCT |
| | | | | | GGCGAGATTTTCAAGTACAAGTGGACCGTGACCGTGGAAGATGGCCCCACCAAGAGCGACCCTAGATGTCTGACACGG |
| | | | | | TACTACAGCAGCTTCGTGAACATGGAACGCGACCTGGCCAGCGGCCTGATTGGACCTCTGCTGATCTGCTACAAAGAAA |
| | | | | | GCGTGGACCAGCGGGGCAACCAGATCATGAGCGACAAGCGGAACGTGATCCTGTTTAGCGTGTTCGATGAGAACCGGT |
| | | | | | CCTGGTATCTGACCGAGAACATCCAGCGGTTTCTGCCCAATCCTGCCGGGGTGCAACTGGAAGATCCTGAGTTCCAGGC |
| | | | | | AAGCAACATCATGCACTCCATCAATGGCTATGTGTTCGACAGCCTGCAGCTGAGCGTGTGCCTGCACGAAGTGGCCTAC |
| | | | | | TGGTACATCCTGAGCATTGGCGCCCAGACCGACTTCCTGTCCGTGTTCTTTAGCGGCTACACCTTCAAGCACAAGATGGT |
| | | | | | GTACGAGGATACCCTGACACTGTTCCCATTCAGCGGCGAGACAGTGTTCATGAGCATGGAAAACCCCGGCCTGTGGATT |
| | | | | | CTGGGCTGTCACAACAGCGACTTCCGGAACAGAGGCATGACAGCCCTGCTGAAGGTGTCCAGCTGCGACAAGAACACC |
| | | | | | GGCGACTACTACGAGGACAGCTATGAGGACATCAGCGCCTACCTGCTGAGCAAGAACAATGCCATCGAGCCCAGAAGC |
| | | | | | TTCAGCCAGAATAGCAGACACCCCTCCACCAGACAGAAGCAGTTCAACGCCACAACAATCCCCGAGAACGACATCGAGA |
| | | | | | AAACCGATCCTTGGTTTGCCCACAGAACCCCTATGCCTAAGATCCAGAACGTGTCCTCCAGCGATCTGCTGATGCTCCTG |
| | | | | | AGACAGAGCCCTACACCTCACGGACTGAGCCTGTCCGATCTGCAAGAGGCCAAATACGAAACCTTCAGCGACGACCCTT |
| | | | | | CTCCTGGCGCCATCGACAGCAACAATAGCCTGAGCGAGATGACCCACTTCAGACCACAGCTGCACCACAGCGGCGACAT |
| | | | | | GGTGTTTACACCTGAGAGCGGCCTCCAGCTGAGACTGAATGAGAAGCTGGGAACCACCGCCGCCACCGAGCTGAAGAA |
| | | | | | ACTGGACTTCAAGGTGTCCTCTACCAGCAACAACCTGATCAGCACAATCCCCTCCGACAACCTGGCTGCCGGCACCGACA |
| | | | | | ACACATCTTCTCTGGGCCCACCTAGCATGCCCGTGCACTACGATAGCCAGCTGGATACCACACTGTTCGGCAAGAAGTCT |
| | | | | | AGCCCTCTGACAGAGTCTGGCGGCCCTCTGTCTCTGAGCGAGGAAAACAACGACAGCAAGCTGCCTCCTGTGCTGAAGC |
| | | | | | GGCACCAGCGGGAAATCACCAGAACCACACTGCAGAGCGACCAAGAGGAAATCGATTACGACGACACCATCAGCGTCG |
| | | | | | AGATGAAGAAAGAAGATTTCGACATCTACGACGAGGACGAGAATCAGAGCCCCAGATCCTTTCAGAAAAAGACCCGGC |
| | | | | | ACTACTTCATTGCCGCCGTCGAGAGACTGTGGGACTACGGCATGTCTAGCAGCCCTCACGTGCTGAGAAATAGAGCCCA |
| | | | | | GAGCGGCAGCGTGCCCCAGTTCAAGAAAGTGGTGTTCCAAGAGTTCACCGACGGCAGCTTCACCCAGCCACTGTATAG |
| | | | | | AGGCGAGCTGAACGAGCATCTGGGCCTGCTGGGCCCTTATATCAGAGCCGAAGTGGAAGATAACATCATGGTCACCTT |
| | | | | | CCGGAATCAGGCTAGCCGGCCTTACAGCTTCTACAGCTCCCTGATCTCCTACGAAGAGGACCAGAGACAGGGCGCTGA |
| | | | | | GCCCCGGAAGAATTTCGTGAAGCCCAACGAGACTAAGACCTACTTTTGGAAGGTGCAGCACCACATGGCCCCTACAAAG |
| | | | | | GACGAGTTCGACTGCAAAGCCTGGGCCTACTTCTCCGATGTGGATCTGGAAAAGGACGTGCACAGCGGGCTCATCGGA |
| | | | | | CCACTGCTTGTGTGCCACACCAACACACTGAACCCCGCTCACGGCAGACAAGTGACAGTGCAAGAGTTCGCCCTGTTCTT |
| | | | | | CACCATCTTCGACGAAACAAAGAGCTGGTACTTCACCGAGAATATGGAACGGAACTGCAGGGCCCCTTGCAACATCCAG |
| | | | | | ATGGAAGATCCCACCTTCAAAGAGAACTACCGGTTCCACGCCATCAACGGCTACATCATGGACACACTGCCCGGCCTGG |
| | | | | | TTATGGCCCAGGATCAGAGAATCCGGTGGTATCTGCTGTCCATGGGCTCCAACGAGAATATCCACAGCATCCACTTCAG |
| | | | | | CGGCCACGTGTTCACCGTGCGGAAAAAAGAAGAGTACAAAATGGCCCTGTACAATCTGTACCCTGGGGTGTTCGAAAC |
| | | | | | CGTGGAAATGCTGCCTTCCAAGGCCGGCATTTGGAGAGTGGAATGTCTGATTGGAGAGCACCTCCACGCCGGAATGAG |
| | | | | | CACCCTGTTTCTGGTGTACTCCAACAAGTGTCAGACCCCTCTCGGCATGGCCTCTGGACACATCAGAGACTTCCAGATCA |
| | | | | | CCGCCTCTGGCCAGTACGGACAGTGGGCTCCTAAACTGGCTCGGCTGCACTACTCCGGCAGCATCAATGCCTGGTCCAC |
| | | | | | CAAAGAGCCCTTCAGCTGGATCAAGGTGGACCTGCTGGCTCCCATGATCATCCACGGAATCAAGACCCAGGGCGCAAG |
| | | | | | ACAGAAGTTCAGCAGCCTGTACATCAGCCAGTTCATCATCATGTACAGCCTGGACGGAAAGAAGTGGCAGACCTACCG |
| | | | | | GGGCAATAGCACCGGCACACTCATGGTGTTCTTCGGCAACGTGGACTCCAGCGGCATTAAGCACAACATCTTCAACCCT |
| | | | | | CCAATCATTGCCCGGTACATCCGGCTGCACCCCACACACTACAGCATCCGGTCTACCCTGAGAATGGAACTGATGGGCT |
| | | | | | GCGACCTGAACAGCTGCTCTATGCCCCTCGGAATGGAAAGCAAGGCCATCAGCGACGCCCAGATCACAGCCAGCAGCT |
| | | | | | ACTTCACCAACATGTTCGCCACTTGGAGCCCCTCCAAGGCTAGACTGCATCTGCAGGGCAGAAGCAACGCTTGGAGGCC |
| | | | | | CCAAGTGAACAACCCCAAAGAGTGGCTGCAGGTTGACTTTCAAAAGACCATGAAAGTGACCGGCGTGACCACACAGGG |
| | | | | | CGTCAAGTCTCTGCTGACCTCTATGTACGTGAAAGAGTTCCTGATTAGCAGCAGCCAGGACGGCCACCAGTGGACCCTG |
| | | | | | TTTTTCCAGAACGGCAAAGTGAAAGTGTTCCAGGGCAATCAGGACAGCTTCACACCCGTGGTCAATTCTCTGGACCCTCC |
| | | | | | ACTGCTGACCAGATACCTGCGGATTCACCCTCAGTCTTGGGTGCACCAGATCGCTCTGCGGATGGAAGTGCTGGGCTGT |
| | | | | | GAAGCTCAGGACCTCTACTAG |
| CpG-free human | 4374 | | 1 | 393 | ATGCAGATAGAATTATCTACTTGTTTTTTTCTTTGTCTGCTCAGGTTCTGCTTCTCTGCTACAAGGAGGTATTACTTAGGT |
| hFVIII BDD | | | | | GCTGTAGAGTTATCTTGGGACTACATGCAGTCTGATCTTGGGGAGCTCCCTGTGGATGCAAGATTTCCCCCTAGAGTACC |
| COOL optimized | | | | | TAAAAGTTTCCCTTTCAACACAAGTGTGGTGTATAAGAAGACTCTGTTTGTTGAGTTCACAGATCACCTTTTCAATATTGC |
| | | | | | CAAGCCCAGACCCCCCTGGATGGGTCTACTGGGGCCAACAATTCAAGCAGAGGTATATGATACAGTGGTGATCACATTA |
| | | | | | AAGAACATGGCATCCCACCCTGTAAGCCTGCATGCTGTTGGTGTGTCCTATTGGAAAGCAAGTGAAGGTGCTGAATATG |
| | | | | | ATGATCAAACATCCCAAAGAGAGAAGGAAGATGACAAAGTCTTCCCAGGTGGCTCTCACACCTATGTGTGGCAAGTGCT |
| | | | | | CAAGGAAAATGGGCCTATGGCTAGTGATCCATTGTGCCTCACATATAGCTACCTGTCCCATGTGGACTTAGTTAAAGATC |
| | | | | | TGAACTCAGGTCTGATTGGTGCCCTGCTGGTCTGTAGGGAAGGATCACTAGCTAAAGAAAAAACCCAGACTTTACACAA |
| | | | | | GTTCATCTTATTATTTGCTGTTTTTGATGAGGGAAAGAGCTGGCACTCAGAGACTAAGAATTCACTCATGCAGGATAGA |
| | | | | | GATGCAGCTTCTGCTAGAGCATGGCCAAAAATGCATACTGTGAATGGGTATGTTAACAGGAGTCTGCCTGGCCTCATAG |
| | | | | | GCTGCCATAGAAAATCAGTGTACTGGCATGTCATAGGTATGGGCACTACTCCTGAGGTGCATTCCATTTTTTTGGAGGG |
| | | | | | GCATACTTTCCTTGTAAGAAACCACAGGCAGGCTTCATTGGAAATTAGTCCAATAACCTTTCTCACAGCCCAGACTCTGCT |
| | | | | | AATGGACTTGGGGCAGTTTTTATTATTTTGTCACATTAGCTCTCATCAGCATGATGGAATGGAAGCCTATGTTAAGGTTG |
| | | | | | ATTCCTGCCCAGAAGAGCCCCAGTTGAGAATGAAGAACAATGAGGAAGCAGAAGACTATGATGATGATCTAACAGACT |
| | | | | | CAGAAATGGATGTTGTGAGATTTGATGATGATAACTCCCCAAGTTTTATTCAGATCAGGTCAGTGGCCAAGAAACATCC |
| | | | | | AAAAACATGGGTTCATTATATTGCAGCAGAAGAAGAAGACTGGGATTATGCACCCTTGGTATTAGCCCCTGATGACAGA |
| | | | | | AGCTATAAGTCACAATATCTCAACAATGGACCCCAGAGAATTGGCAGAAAGTACAAAAAAGTCAGGTTTATGGCTTATA |
| | | | | | CTGATGAGACTTTCAAAACTAGAGAGGCTATTCAACATGAATCTGGCATCCTAGGTCCTTTGTTATATGGGGAAGTAGG |
| | | | | | GGACACCTTATTAATTATATTTAAAAACCAGGCCAGTAGGCCTTACAACATTTACCCCCACGGTATAACAGATGTCAGAC |
| | | | | | CACTGTACTCAAGGAGGCTACCAAAAGGGGTGAAGCACCTAAAAGACTTCCCCATCCTACCTGGTGAGATTTTCAAGTA |
| | | | | | TAAGTGGACAGTGACTGTAGAAGATGGTCCAACCAAATCAGATCCCAGATGCCTGACAAGGTACTACAGTAGCTTTGTA |
| | | | | | AATATGGAGAGAGACCTGGCCTCAGGGTTAATAGGGCCCCTACTGATCTGCTACAAGGAGAGTGTAGACCAAAGAGGC |
| | | | | | AACCAAATTATGTCAGACAAGAGAAATGTCATCCTCTTTAGTGTTTTTGATGAGAATAGGTCCTGGTACCTGACAGAAAA |
| | | | | | TATCCAAAGATTCCTTCCAAATCCAGCAGGGGTACAACTGGAGGACCCTGAGTTCCAGGCCTCCAATATCATGCACAGC |
| | | | | | ATCAATGGTTATGTGTTTGACAGTTTGCAACTTTCAGTGTGCCTTCATGAGGTTGCATACTGGTATATACTTTCTATAGGG |
| | | | | | GCCCAGACAGACTTCTTGTCAGTTTTCTTTTCAGGCTATACTTTCAAGCATAAGATGGTATATGAAGATACCCTGACTCTT |
| | | | | | TTTCCCTTTAGTGGTGAGACAGTTTTCATGTCAATGGAAAACCCAGGGCTTTGGATCTTGGGATGCCACAACTCTGACTT |
| | | | | | TAGAAACAGAGGCATGACTGCCCTTTTAAAGGTGTCCTCTTGTGATAAGAATACTGGAGACTACTATGAGGACAGCTAT |
| | | | | | GAGGACATTTCAGCCTATCTGCTGTCAAAAAATAATGCTATAGAGCCAAGGTCATTTTCTCAAAATCCTCCTGTCCTGAA |
| | | | | | GAGGCACCAAAGAGAGATAACCAGGACTACCTTACAGTCTGACCAGGAGGAAATTGATTATGATGACACAATAAGTGT |
| | | | | | GGAGATGAAAAAGGAGGATTTTGATATTTATGATGAGGATGAAAACCAATCTCCAAGATCTTTCCAGAAGAAGACTAG |
| | | | | | ACACTATTTCATTGCTGCAGTGGAAAGACTGTGGGACTATGGAATGTCCTCCAGCCCTCATGTTCTCAGGAATAGGGCTC |
| | | | | | AAAGTGGTTCTGTGCCACAGTTCAAGAAGGTGGTGTTTCAGGAATTCACAGATGGGTCCTTTACTCAACCACTGTATAG |
| | | | | | GGGAGAACTCAATGAACATCTAGGATTACTAGGTCCCTACATTAGAGCTGAGGTGGAGGACAATATCATGGTCACTTTC |
| | | | | | AGGAACCAGGCATCTAGACCATACTCTTTTTACAGCTCCTTGATATCTTATGAAGAGGACCAGAGACAGGGTGCAGAAC |
| | | | | | CCAGGAAGAACTTTGTGAAACCCAATGAGACCAAAACATACTTCTGGAAGGTCCAGCATCATATGGCTCCTACCAAGGA |
| | | | | | TGAATTTGACTGCAAAGCCTGGGCTTACTTCTCAGATGTGGATTTGGAGAAAGATGTGCACAGTGGCTTGATTGGGCCT |
| | | | | | CTTTTGGTATGTCATACCAACACCTTAAACCCTGCTCATGGAAGACAAGTAACAGTGCAAGAGTTTGCCCTCTTTTTCACT |
| | | | | | ATATTTGATGAGACAAAAAGTTGGTACTTTACTGAGAATATGGAGAGGAACTGCAGGGCTCCCTGCAATATACAGATGG |
| | | | | | AGGATCCTACTTTCAAGGAAAACTATAGGTTTCATGCCATTAATGGCTATATCATGGATACATTGCCTGGCTTAGTTATG |
| | | | | | GCCCAGGATCAGAGAATCAGATGGTACCTCCTTAGTATGGGAAGCAATGAAAACATACATTCTATTCACTTCAGTGGAC |
| | | | | | ATGTCTTTACTGTGAGAAAAAAGGAAGAGTACAAGATGGCACTGTACAATCTGTACCCTGGAGTGTTTGAGACAGTTGA |
| | | | | | GATGCTGCCCAGCAAGGCTGGGATCTGGAGGGTAGAATGCCTGATGGAGAACACTTACATGCAGGTATGTCCACTCT |
| | | | | | ATTCTTGGTCTATTCCAACAAGTGTCAGACCCCCCTAGGCATGGCATCTGGCCATATTAGAGATTTCCAGATAACTGCTTC |
| | | | | | TGGTCAGTATGGCCAGTGGGCCCCCAAGCTGCTAGACTTCACTACAGTGGTTCAATAAATGCCTGGTCCACCAAGGAG |
| | | | | | CCCTTCAGCTGGATTAAAGTGGACTTGCTAGCCCCCATGATCATTCATGGGATAAAAACACAGGGTGCCAGACAGAAAT |
| | | | | | TTTCATCTCTGTACATCAGCCAGTTTATCATCATGTACAGTCTGGATGGCAAAAAATGGCAGACCTACAGAGGTAACTCT |
| | | | | | ACAGGTACACTAATGGTATTTTTTGGCAATGTAGATTCATCAGGTATCAAGCATAATATCTTTAATCCTCCCATTATTGCC |
| | | | | | AGATACATCAGGTTGCACCCAACTCATTACAGTATAAGATCCACTTTAAGGATGGAGCTTATGGGGTGTGACCTTAATA |
| | | | | | GCTGCAGTATGCCCTTGGGAATGGAAAGTAAGGCCATATCAGATGCCCAGATTACTGCAAGCAGCTACTTTACAAACAT |
| | | | | | GTTTGCAACCTGGTCTCCTAGTAAAGCCAGGCTGCACTTGCAGGGTAGGAGCAATGCATGGAGACCCCAGGTCAATAAC |
| | | | | | CCAAAAGAGTGGCTTCAAGTTGACTTTCAAAAGACAATGAAGGTAACAGGGGTAACCACCCAAGGGGTAAAGAGTCTG |
| | | | | | CTGACATCTATGTATGTAAAAGAATTCCTCATCTCAAGTAGTCAAGATGGGCACCAGTGGACACTGTTCTTCCAGAATGG |
| | | | | | AAAAGTTAAGGTGTTCCAAGGTAATCAAGACAGCTTCACTCCAGTGGTGAACAGTCTGGATCCACCACTCCTAACCAGG |
| | | | | | TACCTGAGGATCCACCCTCAGTCCTGGGTCCACCAGATAGCTCTGAGAATGGAAGTGCTGGGCTGTGAAGCTCAGGACC |
| | | | | | TATACTGA |
| CpG-free human | 7056 | | 0 | 394 | ATGCAAATTGAATTGAGTACCTGTTTTTTCCTCTGTCTATTAAGGTTTTGTTTCAGTGCAACAAGAAGGTATTATCTGGGA |
| hFVIII Full | | | | | GCTGTTGAGTTATCCTGGGACTACATGCAGTCTGACCTGGGAGAGCTCCCAGTGGATGCTAGGTTTCCCCCAAGAGTAC |
| Length COOL | | | | | CCAAAAGCTTCCCTTTCAACACTTCTGTTGTCTATAAAAAGACTCTGTTTGTAGAATTCACAGATCATCTGTTTAACATTGC |
| optimized | | | | | CAAGCCTAGACCTCCATGGATGGGGCTGCTGGGACCAACTATTCAGGCAGAGGTTTATGACACTGTGGTGATTACACTT |
| | | | | | AAGAATATGGCATCCCACCCAGTGAGCCTGCATGCTGTTGGGGTTTCCTACTGGAAGGCAAGTGAAGGAGCTGAGTAT |
| | | | | | GATGACCAGACTAGCCAAAGAGAGAAGGAGGATGACAAGGTCTTTCCAGGTGGCAGCCACACCTATGTCTGGCAGGTG |
| | | | | | CTGAAGGAGAATGGCCCTATGGCCTCTGATCCTTTGTGTCTAACCTACAGTTATTTGTCTCATGTGGACCTGGTGAAGGA |
| | | | | | CCTTAACTCAGGGCTGATAGGGGCCTTGCTGGTGTGTAGGGAGGGAAGCCTGGCTAAGGAAAAGACACAGACTCTGCA |
| | | | | | TAAGTTTATTCTCTTGTTTGCAGTGTTTGATGAGGGTAAAAGCTGGCACTCTGAAACAAAAAACAGCTGATGCAGGAC |
| | | | | | AGGGATGCTGCCAGTGCTAGGGCTGGCCTAAGATGCACACAGTCAATGGCTATGTTAACAGATCACTGCCTGGTTTGA |
| | | | | | TTGGCTGCCACAGAAAGTCTGTTTACTGGCATGTAATTGGGATGGGGACAACCCCAGAAGTTCACTCTATCTTCCTGGA |
| | | | | | AGGGCACACCTTCCTGGTTAGAAATCATAGACAGGCATCCTTAGAGATTTCTCCTATTACATTCCTGACTGCCCAGACCC |
| | | | | | TCCTCATGGACCTGGGTCAGTTCCTGCTTTTTTGCCACATTTCCTCCCACCAGCATGATGGCATGGAGGCCTATGTGAAA |
| | | | | | GTTGATTCTTGCCCTGAGGAGCCTCAGCTTAGGATGAAGAACAATGAAGAGGCTGAGGACTATGATGATGACCTAACA |
| | | | | | GACAGTGAGATGGATGTTGTGAGGTTTGATGATGACAATTCACCTAGTTTCATCCAGATTAGGTCTGTGGCTAAGAAAC |
| | | | | | ATCCAAAGACCTGGGTTCACTACATTGCAGCAGAGGAGGAGGACTGGGATTATGCCCCCCTGGTTCTGGCACCTGATGA |
| | | | | | CAGAAGCTATAAGTCCCAGTATCTCAACAATGGCCCCCAGAGGATTGGAAGAAAATACAAAAAAGTCAGATTTATGGCC |
| | | | | | TATACAGATGAGACTTTTAAAACTAGGGAAGCTATTCAGCATGAGTCAGGGATCCTGGGACCTCTTCTTTATGGAGAGG |
| | | | | | TGGGGGACACTCTTCTGATAATTTTTAAAAATCAGGCAAGTAGACCTTATAACATCTACCCCCATGGGATCACTGATGTC |
| | | | | | AGGCCTCTGTACTCAAGAAGGCTGCCCAAGGGTGTCAAACACCTCAAGGATTTCCCTATTCTTCCTGGGGAGATCTTCAA |
| | | | | | ATACAAGTGGACAGTTACTGTGGAGGATGGCCCCACCAAATCTGACCCAAGGTGCCTCACCAGATATTACAGCTCCTTT |
| | | | | | GTGAATATGGAAAGAGACCTAGCTAGTGGTCTCATTGGCCCACTGCTCATCTGTTACAAGGAGTCAGTGGACCAGAGA |
| | | | | | GGGAATCAAATTATGTCTGACAAGAGAAATGTGATCCTTTTCTCAGTGTTTGATGAGAACAGAAGCTGGTATCTGACAG |
| | | | | | AGAACATTCAAAGGTTTCTGCCAAACCCAGCTGGAGTTCAGCTGGAGGACCCTGAATTCCAGGCATCTAATATTATGCAT |
| | | | | | TCTATCAATGGATATGTGTTTGATAGTCTGCAGCTGTCTGTGTGCCTGCATGAAGTGGCCTACTGGTATATCCTCTCTATT |
| | | | | | GGTGCCCAGACAGATTTCTTGTCTGTGTTTTTCAGTGGTTACACATTTAAACATAAAATGGTGTATGAGGACACACTTAC |
| | | | | | ATTATTCCCTTTTAGTGGAGAGACAGTGTTTATGTCCATGGAGAATCCAGGCCTGTGGATCTTGGGGTGTCATAATAGTG |
| | | | | | ACTTTAGGAATAGAGGTATGACAGCTCTGCTCAAAGTGTCTTCCTGTGACAAGAACACAGGGGACTATTATGAGGACTC |
| | | | | | TTATGAGGACATTTCAGCCTATTTACTGTCCAAGAACAATGCCATTGAACCAAGATCTTTCTCTCAGAACTCAAGACACCC |
| | | | | | CAGCACCAGGCAGAAGCAGTTCAATGCAACCACCATCCCAGAGAATGATATTGAAAAAACTGACCCTTGGTTTGCCCAC |
| | | | | | AGGACTCCCATGCCTAAGATTCAGAATGTATCTTCATCAGACTTGCTGATGCTCCTGAGACAGAGCCCAACTCCTCATGG |
| | | | | | CCTGAGCTTAAGTGACCTCCAGGAGGCTAAGTATGAAACTTTCTCAGATGATCCCAGTCCTGGTGCCATTGATTCTAATA |
| | | | | | ATTCCCTGTCTGAGATGACACACTTCAGACCCCAGCTCCACCACTCTGGAGATATGGTCTTTACTCCTGAATCAGGCCTG |
| | | | | | CAGCTGAGGCTGAATGAAAAGCTGGCACCACAGCAGCTACTGAACTGAAAAAGCTGGATTTTAAAGTGAGCTCCACAT |
| | | | | | CCAACAACCTGATTTCCACTATCCCCTCAGATAACTTGGCAGCAGGGACTGATAACACAAGCTCACTGGGTCCCCCTTCC |
| | | | | | ATGCCTGTCCATTATGATAGTCAGCTGGATACTACTCTGTTTGGTAAGAAATCCTCTCCCCTGACTGAAAGTGGAGGCCC |
| | | | | | TCTTTCCCTGTCAGAGGAGAACAATGACAGCAAACTGTTAGAGTCTGGACTCATGAACTCACAGGAAAGTTCTTGGGGC |
| | | | | | AAGAATGTGTCTAGCACTGAGTCTGGGAGACTGTTTAAGGGCAAGAGGGCCCATGGACCAGCCCTGCTGACAAAGGAT |
| | | | | | AATGCACTGTTTAAGGTCTCAATCAGCCTGTTGAAGACCAACAAAACCAGTAATAATTCTGCAACAAACAGGAAGACCC |
| | | | | | ACATTGATGGACCCTCTCTTCTCATTGAGAATTCCCCTTCTGTCTGGCAGAACATCTTGGAATCAGATACAGAGTTCAAG |
| | | | | | AAGGTGACTCCCCTGATCCATGATAGGATGCTCATGGATAAGAATGCCACAGCACTCAGGCTCAATCACATGAGCAACA |
| | | | | | AGACTACCTCCTCCAAAAATATGGAGATGGTGCAGCAGAAGAAGGAAGGTCCCATTCCCCCTGATGCACAGAATCCAG |
| | | | | | ATATGAGCTTCTTTAAGATGCTGTTTTTCCTGAGTCTGCCAGGTGGATTCAGAGGACACATGGGAAGAACTCACTTAAC |
| | | | | | TCTGGCCAAGGTCCCAGTCCTAAGCAGTTGGTGAGCTGGGGCCTGAGAAAAGTGTGGAGGGACAGAATTTCCTGTCT |
| | | | | | GAAAAGAACAAAGTGGTTGTGGGCAAAGGAGAGTTCACTAAAGATGTGGGACTGAAGGAGATGGTGTTTCCTAGTTCA |
| | | | | | AGAAATCTCTTTCTTACCAATCTTGATAACCTGCATGAGAACAACACCCACAATCAGGAAAAGAAGATCCAGGAGGAAA |
| | | | | | TTGAGAAGAAGGAAACCCTGATCCAGGAAAATGTTGTGCTGCCACAGATCCACACTGTTACTGGGACCAAAAATTTCAT |
| | | | | | GAAAAACCTGTTTCTCCTGTCTACCAGACAGAATGTAGAGGGAAGCTATGATGGGGCCTATGCCCCTGTTCTCCAGGAC |
| | | | | | TTCAGATCCCTGAATGACTCCACCAACAGGACTAAGAAACATACTGCACACTTTAGTAAGAAGGGGGAGGAGGAGAAC |
| | | | | | CTGGAGGGATTGGGAAACCAGACCAAGCAGATTGTGGAGAAATATGCTGCACCACTAGAATCTCACCTAACACAAGC |
| | | | | | CAGCAGAACTTTGTGACCCAGAGGTCTAAGAGGGCCCTCAAACAGTTTAGATTGCCTTTGGAGGAGACTGAGCTGGAA |
| | | | | | AAGAGGATTATTGTGGATGACACCTCTACCCAGTGGAGCAAGAATATGAAGCACCTGACCCCAAGCACCCTTACTCAGA |
| | | | | | TTGATTACAATGAAAAAGAAAAGGGTGCCATCACCCAGAGCCCCTTGAGTGACTGTTTGACAAGGTCCCACAGTATCCC |
| | | | | | ACAGGCTAACAGATCTCCTCTGCCTATTGCCAAGGTCAGCTCCTTCCCTTCCATCAGACCCATCTATCTGACCAGAGTGCT |
| | | | | | GTTCCAGGACAACTCCTCTCATCTGCCAGCTGCCTCCTATAGGAAGAAGGATAGTGGTGTGCAGGAATCATCTCACTTTC |
| | | | | | TGCAGGGAGCCAAGAAGAACAATCTGAGCCTGGCAATTCTCACACTTGAGATGACAGGAGACCAGAGGGAAGTGGGA |
| | | | | | AGTCTGGGCACTTCTGCTACCAATTCTGTCACCTACAAGAAAGTGGAGAATACAGTTCTGCCCAAGCCAGACCTGCCTAA |
| | | | | | AACATCTGGAAAGGTTGAGCTGCTGCCTAAGGTGCACATATACCAGAAGGACCTATTCCCTACAGAGACATCCAATGGC |
| | | | | | TCCCCAGGCCACCTGGACTTGGTAGAGGGGTCTCTCCTGCAGGGCACTGAAGGTGCTATCAAGTGGAATGAGGCTAAT |
| | | | | | AGACCTGGGAAGGTGCCATTTCTGAGGGTGGCCACAGAGAGCTCAGCTAAGACACCCAGCAAGCTGCTTGATCCCCTG |
| | | | | | GCCTGGGACAATCACTATGGAACCCAGATTCCTAAGGAGGAGTGGAAGTCCCAGGAGAAGTCCCCAGAGAAGACTGCT |
| | | | | | TTCAAGAAGAAGGACACTATCCTCTCCCTGAATGCCTGTGAGTCTAACCATGCTATTGCTGCCATCAATGAAGGCCAGAA |
| | | | | | CAAGCCTGAAATTGAGGTGACATGGGCCAAGCAGGGCAGAACAGAGAGGCTGTGCAGCCAGAACCCACCTGTGCTCA |
| | | | | | AGAGGCACCAGAGAGAGATCACTAGAACCACTCTGCAGTCAGACCAGGAAGAGATTGACTATGATGACACCATCTCAG |
| | | | | | TTGAGATGAAAAAGGAGGATTTTGATATTTATGATGAGGATGAGAATCAATCCCCAAGATCTTTTCAGAAGAAGACAAG |
| | | | | | ACATTACTTCATTGCTGCAGTGGAGAGACTGTGGGATTATGGCATGTCCTCCTCACCTCATGTGCTGAGAAATAGAGCCC |
| | | | | | AGTCTGGCTCTGTGCCCCAGTTCAAAAAAGTGGTGTTTCAGGAGTTCACAGATGGTTCCTTCACACAGCCCCTGTACAGG |
| | | | | | GGTGAGCTGAATGAGCACCTGGGGTTGCTGGGCCCCTACATCAGAGCTGAAGTTGAGGATAATATTATGGTGACCTTC |
| | | | | | AGGAATCAGGCCAGTAGGCCTTACTCTTTCTACTCCAGCCTGATCTCATATGAGGAGGACCAGAGACAGGGGGCTGAAC |
| | | | | | CTAGGAAGAATTTTGTGAAGCCCAATGAAACAAAGACATACTTCTGGAAGGTGCAGCACCACATGGCTCCTACCAAGGA |
| | | | | | TGAATTTGATTGCAAGGCTTGGGCCTATTTTTCTGATGTGGACCTGGAGAAGGATGTGCATTCTGGCCTCATTGGCCCTC |
| | | | | | TCTTGGTGTGTCACACCAATACCTTGAATCCAGCCCATGGCAGACAGGTGACTGTTCAGGAGTTTGCTCTGTTTTTCACC |
| | | | | | ATCTTTGATGAGACAAAGTCCTGGTATTTTACAGAGAATATGGAGAGGAATTGCAGGGCCCCCTGCAACATCCAGATGG |
| | | | | | AAGACCCAACCTTCAAGGAGAACTACAGATTCCATGCAATCAATGGATATATCATGGACACCCTGCCTGGCCTGGTTAT |
| | | | | | GGCTCAGGATCAGAGAATCAGGTGGTATCTGCTGTCTATGGGGTCAAATGAGAACATCCATAGTATCCACTTCTCTGGC |
| | | | | | CATGTGTTTACAGTGAGAAAGAAGGAAGAATATAAGATGGCCCTGTACAACCTCTACCCTGGAGTGTTTGAAACTGTTG |
| | | | | | AAATGCTGCCTTCAAAGGCTGGAATCTGGAGGGTGGAATGCCTGATTGGAGAGCACCTTCATGCTGGCATGTCCACCCT |
| | | | | | GTTTCTGGTGTACAGCAATAAGTGTCAGACTCCTCTGGGTATGGCTTCAGGCCACATCAGGGACTTCCAGATCACTGCCT |
| | | | | | CAGGACAGTATGGACAGTGGGCTCCCAAACTGGCAAGGCTCCACTACTCAGGCAGCATTAATGCCTGGTCCACCAAAG |
| | | | | | AGCCTTTCAGCTGGATTAAGGTGGATCTCCTGGCACCTATGATCATCCATGGGATCAAGACTCAGGGAGCTAGGCAGAA |
| | | | | | GTTTAGCAGCCTGTACATTTCTCAGTTTATCATTATGTACAGCCTGGATGGAAAAAAGTGGCAGACCTATAGAGGAAACT |
| | | | | | CCACTGGAACACTGATGGTGTTTTTTGGCAATGTGGACTCAAGTGGGATCAAGCACAATATCTTCAACCCCCCTATCATT |
| | | | | | GCCAGATACATCAGGCTCCACCCTACACACTACTCTATCAGATCTACACTTAGGATGGAGCTGATGGGATGTGATCTGAA |
| | | | | | CTCTTGCAGTATGCCTCTGGGTATGGAGTCCAAGGCCATCTCTGATGCTCAGATCACAGCCAGCTCTTACTTTACTAATAT |
| | | | | | GTTTGCTACCTGGTCCCCAAGCAAGGCAAGACTGCACCTGCAGGGCAGATCCAATGCTTGGAGACCCCAGGTGAATAAC |
| | | | | | CCAAAAGAGTGGCTTCAGGTGGACTTCCAGAAGACTATGAAGGTGACTGGAGTGACCACCCAGGGGGTGAAGTCACTG |
| | | | | | CTGACCTCCATGTATGTGAAGGAGTTCCTGATCTCCAGCTCCCAGGATGGCCACCAGTGGACCCTGTTCTTCCAGAATGG |
| | | | | | AAAGGTGAAGGTGTTCCAGGGAAACCAGGACTCCTTTACCCCTGTGGTGAACTCCCTGGACCCCCCACTGCTGACCAGA |
| | | | | | TACCTGAGAATCCATCCCCAGAGCTGGGTGCACCAGATTGCCCTTAGGATGGAGGTGCTGGGATGTGAAGCCCAGGAC |
| | | | | | CTGTACTAA |
| CpG-free human | 5013 | https:// | 0 | 395 | ATGCAAATTGAGTTAAGTACCTGTTTTTTCCTGTGCCTGTTGAGATTTTGCTTCTCTGCTACCAGAAGGTATTACCTGGGA |
| hFVIII 226 | | www.ncbi. | | | GCTGTGGAGCTGTCATGGGACTACATGCAGTCTGACCTGGGAGAGCTCCCTGTTGATGCTAGGTTTCCCCCTAGGGTGC |
| Variant COOL | | nLm.nih. | | | CAAAGTCCTTTCCTTTTAACACCTCAGTGGTGTACAAGAAGACACTGTTTGTGGAGTTTACTGACCACCTCTTCAATATTG |
| optimized | | gov/ | | | CTAAGCCAAGACCCCCTTGGATGGGTCTCTTGGGCCCTACCATCCAGGCTGAGGTTTATGATACAGTGGTGATTACCCTC |
| | | pubmed/ | | | AAGAATATGGCTTCTCATCCTGTTAGTCTGCATGCAGTAGGGGTCAGCTATTGGAAGGCCAGTGAAGGAGCTGAGTAT |
| | | 14726380 | | | GATGACCAGACCAGCCAGAGAGAGAAAGAGGATGACAAGGTGTTCCCTGGGGGATCACACACCTATGTGTGGCAGGT |
| | | | | | GTTGAAGGAAAATGGACCCATGGCCTCTGACCCACTCTGCCTGACTTACTCCTACCTGTCTCATGTGGACCTGGTCAAAG |
| | | | | | ATCTGAACTCTGGCCTGATTGGGGCACTGTTGGTGTGCAGAGAAGGGTCTCTTGCCAAGGAGAAGACTCAGACCCTGC |
| | | | | | ACAAGTTCATCCTGCTGTTTGCTGTGTTTGATGAAGGCAAGTCTTGGCATTCTGAGACTAAGAACAGCCTGATGCAAGAT |
| | | | | | AGAGATGCTGCATCTGCCAGGGCCTGGCCTAAGATGCACACTGTGAATGGATATGTGAATAGGTCCTTGCCTGGCCTGA |
| | | | | | TTGGATGCCATAGGAAGTCTGTGTACTGGCATGTGATTGGCATGGGCACCACCCCTGAGGTTCACTCTATTTTTCTGGAG |
| | | | | | GGCCATACTTTCCTTGTGAGGAATCATAGACAGGCCTCTCTGGAGATTAGCCCTATTACATTTCTGACTGCTCAGACCCTC |
| | | | | | CTCATGGACTTGGGGCAGTTTCTGTTATTCTGCCACATCAGCAGCCATCAACATGATGGTATGGAAGCCTATGTCAAAGT |
| | | | | | GGATAGCTGCCCTGAAGAACCACAGCTTAGGATGAAGAACAATGAGGAGGCAGAGGACTATGATGATGATCTGACTG |
| | | | | | ATTCTGAAATGGATGTGGTGAGATTTGATGATGATAATAGCCCTTCCTTTATCCAGATCAGGTCAGTGGCCAAGAAGCA |
| | | | | | CCCAAAGACCTGGGTGCATTATATTGCTGCTGAGGAGGAGGACTGGGACTATGCCCCTCTGGTGCTGGCCCCTGATGAT |
| | | | | | AGAAGCTATAAGTCTCAATACTTGAATAATGGCCCACAGAGGATTGGGAGAAAGTACAAAAAGGTGAGATTTATGGCC |
| | | | | | TACACTGATGAGACTTTCAAGACCAGAGAGGCCATCCAGCATGAATCAGGCATTTTGGGTCCCCTGCTGTATGGAGAGG |
| | | | | | TGGGGGATACCCTGCTGATCATCTTTAAGAACCAGGCCAGCAGACCTTACAACATTTACCCTCATGGGATCACAGATGT |
| | | | | | GAGGCCACTCTACTCTAGGAGATTGCCCAAGGGAGTCAAGCATCTTAAGGACTTTCCAATCCTGCCTGGGGAGATCTTC |
| | | | | | AAGTACAAATGGACAGTGACAGTTGAGGATGGACCTACTAAGAGTGACCCCAGGTGTCTGACCAGATATTACTCTAGCT |
| | | | | | TTGTCAATATGGAAAGAGACCTGGCTTCAGGCTTGATAGGCCCTCTTCTCATCTGCTACAAAGAGTCTGTGGACCAGAG |
| | | | | | AGGAAATCAGATTATGTCTGACAAGAGAAATGTTATTCTGTTTTCAGTCTTTGATGAGAACAGAAGTTGGTACTTGACAG |
| | | | | | AGAACATTCAGAGATTTCTGCCTAACCCTGCAGGAGTGCAGCTTGAGGACCCTGAGTTTCAGGCTTCCAATATCATGCAT |
| | | | | | TCTATCAATGGCTATGTGTTTGATAGCCTGCAGCTGTCTGTGTGCCTGCATGAGGTTGCCTATTGGTACATCCTGTCTATT |
| | | | | | GGGGCCCAAACTGATTTCTTGTCTGTGTTTTTCAGTGGATATACCTTTAAGCATAAGATGGTGTATGAAGATACCTTGAC |
| | | | | | ACTTTTCCCTTTCTCAGGAGAGACTGTCTTCATGTCTATGGAGAACCCTGGACTGTGGATCCTGGGATGCCACAACTCAG |
| | | | | | ACTTCAGAAACAGGGGTATGACAGCTCTGCTTAAGGTCTCCTCATGTGACAAAAATACAGGAGACTACTATGAAGATTC |
| | | | | | CTATGAGGACATCTCTGCTTACCTGCTCAGCAAAAACAATGCCATTGAGCCCAGAAGCTTCAGCCAGAATTCCAGACATC |
| | | | | | CCAGTACTAGGCAGAAGCAGTTTAATGCCACCACCATCCCAGAAAATGACATTGAGAAGACAGACCCTTGGTTTGCCCA |
| | | | | | TAGAACCCCAATGCCCAAGATTCAGAATGTGAGCAGCTCAGACTTGCTGATGCTGCTGAGGCAGTCTCCTACTCCCCATG |
| | | | | | GCCTGTCCCTCTCAGATCTGCAGGAAGCCAAGTATGAGACATTTTCTGATGACCCCTCCCCAGGGGCTATTGACAGTAAC |
| | | | | | AACAGCCTGTCTGAAATGACCCACTTCAGACCTCAGCTCCACCACAGTGGGGATATGGTGTTTACCCCAGAGTCAGGCC |
| | | | | | TGCAGCTGAGACTGAATGAGAAGCTGGGAACCACAGCTGCCACAGAACTGAAGAAGCTGGATTTCAAGGTGAGCTCTA |
| | | | | | CTTCAAATAATCTGATTTCCACTATCCCATCTGACAATTTGGCAGCTGGCACTGACAATACAAGCTCTCTGGGCCCACCTA |
| | | | | | GCATGCCAGTGCATTATGACAGCCAGTTGGACACCACTCTTTTTGGAAAGAAATCCAGTCCCCTGACAGAGTCAGGAGG |
| | | | | | ACCCCTTTCTCTGTCTGAGGAGAACAATGATAGTAAGCTTCTGGAGTCAGGCTTGATGAACTCCCAGGAGAGTTCTTGG |
| | | | | | GGCAAGAATGTGAGCTCTAGGGAGATCACCAGAACCACTCTGCAGTCTGACCAAGAAGAGATTGATTATGATGACACT |
| | | | | | ATCTCTGTTGAGATGAAGAAGGAGGACTTTGATATCTATGATGAGGATGAGAACCAGTCTCCAAGAAGTTTCCAGAAGA |
| | | | | | AGACCAGGCACTACTTTATTGCTGCTGTGGAGAGACTGTGGGACTATGGAATGTCCTCCTCCCCTCATGTCCTGAGAAAT |
| | | | | | AGAGCTCAGTCAGGATCAGTGCCCCAGTTCAAGAAGGTGGTGTTCCAGGAATTCACAGATGGAAGTTTTACCCAGCCAC |
| | | | | | TGTATAGAGGTGAACTGAATGAACATCTGGGTCTGCTGGGGCCCTATATCAGGGCTGAGGTGGAGGACAATATTATGG |
| | | | | | TGACCTTTAGAAACCAGGCCTCAAGGCCCTACAGCTTCTACTCTTCCCTCATTTCATATGAGGAAGACCAGAGACAGGGA |
| | | | | | GCAGAGCCTAGAAAGAACTTTGTCAAGCCCAATGAAACCAAAACCTATTTCTGGAAGGTGCAGCACCACATGGCACCCA |
| | | | | | CCAAAGATGAGTTTGACTGCAAAGCCTGGGCCTATTTCTCAGATGTGGATCTGGAGAAGGATGTCCATTCAGGTCTGAT |
| | | | | | TGGACCACTCCTGGTGTGCCACACCAACACACTGAATCCAGCTCATGGCAGACAGGTGACAGTCCAGGAGTTTGCCCTG |
| | | | | | TTTTTCACTATTTTTGATGAGACCAAGAGCTGGTATTTTACAGAGAATATGGAAAGAAACTGCAGAGCCCCTTGTAATAT |
| | | | | | CCAGATGGAGGACCCAACCTTTAAGGAGAACTACAGGTTCCATGCCATCAATGGCTACATTATGGATACCCTGCCTGGC |
| | | | | | CTGGTTATGGCCCAGGATCAGAGGATCAGGTGGTATCTGCTGTCAATGGGCTCCAATGAGAACATTCATAGTATTCACT |
| | | | | | TTTCAGGACATGTGTTCACAGTGAGAAAGAAGGAGGAGTATAAGATGGCCCTCTATAATCTCTACCCAGGGGTGTTTGA |
| | | | | | GACAGTTGAGATGCTGCCATCTAAGGCAGGCATCTGGAGAGTGGAATGCCTCATTGGAGAGCACCTGCATGCTGGCAT |
| | | | | | GTCCACCCTGTTTCTGGTGTACTCCAACAAATGTCAGACCCCTCTTGGTATGGCCTCTGGCCACATTAGGGATTTCCAGAT |
| | | | | | TACTGCCAGTGGTCAGTATGGGCAGTGGGCCCCTAAGCTGGCCAGACTGCACTATTCTGGGAGCATCAATGCCTGGTCC |
| | | | | | ACCAAGGAACCTTTTTCTTGGATTAAAGTGGATCTGCTGGCCCCAATGATCATCCATGGGATCAAGACCCAGGGAGCTA |
| | | | | | GGCAGAAGTTCAGCAGCCTGTACATTAGTCAGTTCATCATTATGTACAGTCTGGATGGCAAAAAGTGGCAGACATACAG |
| | | | | | GGGCAATTCCACTGGAACCCTGATGGTGTTCTTTGGAAATGTGGATAGCAGTGGTATCAAGCACAACATTTTCAACCCTC |
| | | | | | CCATCATTGCCAGGTACATCAGACTGCATCCAACCCACTACAGCATTAGGAGCACCCTTAGGATGGAGCTCATGGGGTG |
| | | | | | TGACCTGAACTCTTGCTCTATGCCACTTGGAATGGAGAGCAAGGCCATCTCTGATGCCCAGATTACTGCTAGTTCCTACT |
| | | | | | TCACCAATATGTTTGCCACCTGGTCACCCAGCAAGGCCAGGCTGCACCTGCAGGGAAGGTCCAATGCTGGAGGCCTCA |
| | | | | | GGTGAACAATCCAAAGGAGTGGCTGCAGGTGGACTTCCAGAAGACTATGAAGGTGACAGGAGTGACCACTCAGGGAG |
| | | | | | TGAAGAGCCTGCTGACCTCCATGTATGTGAAGGAGTTTCTGATCTCCAGCTCCCAGGATGGCCACCAGTGGACCCTGTT |
| | | | | | CTTTCAGAATGGCAAGGTGAAGGTGTTTCAGGGGAATCAGGACTCCTTCACCCCAGTGGTGAATTCCCTGGATCCCCCT |
| | | | | | CTGCTGACCAGATACCTGAGAATCCACCCCCAGTCTTGGGTGCACCAGATTGCCCTTAGGATGGAGGTGCTGGGCTGTG |
| | | | | | AGGCCCAGGACCTGTACTGA |
| CpG-free human | 5013 | https:// | 0 | 396 | ATGCAAATTGAGTTAAGTACCTGTTTTTTCCTGTGCCTGTTGAGATTTTGCTTCTCTGCTACCAGAAGGTATTACCTGGGA |
| hFVIII 226 | | www.ncbi. | | | GCTGTGGAGCTGTCATGGGACTACATGCAGTCTGACCTGGGAGAGCTCCCTGTTGATGCTAGGTTTCCCCCTAGGGTGC |
| Variant with | | nlm.nih. | | | CAAAGTCCTTTCCTTTTAACACCTCAGTGGTGTACAAGAAGACACTGTTTGTGGAGTTTACTGACCACCTCTTCAATATTG |
| F309S Mutation; | | gov/ | | | CTAAGCCAAGACCCCCTTGGATGGGTCTCTTGGGCCCTACCATCCAGGCTGAGGTTTATGATACAGTGGTGATTACCCTC |
| COOL optimized | | pubmed/ | | | AAGAATATGGCTTCTCATCCTGTTAGTCTGCATGCAGTAGGGGTCAGCTATTGGAAGGCCAGTGAAGGAGCTGAGTAT |
| | | 14726380 | | | GATGACCAGACCAGCCAGAGAGAGAAAGAGGATGACAAGGTGTTCCCTGGGGGATCACACACCTATGTGTGGCAGGT |
| | | | | | GTTGAAGGAAAATGGACCCATGGCCTCTGACCCACTCTGCCTGACTTACTCCTACCTGTCTCATGTGGACCTGGTCAAAG |
| | | | | | ATCTGAACTCTGGCCTGATTGGGGCACTGTTGGTGTGCAGAGAAGGGTCTCTTGCCAAGGAGAAGACTCAGACCCTGC |
| | | | | | ACAAGTTCATCCTGCTGTTTGCTGTGTTTGATGAAGGCAAGTCTTGGCATTCTGAGACTAAGAACAGCCTGATGCAAGAT |
| | | | | | AGAGATGCTGCATCTGCCAGGGCCTGGCCTAAGATGCACACTGTGAATGGATATGTGAATAGGTCCTTGCCTGGCCTGA |
| | | | | | TTGGATGCCATAGGAAGTCTGTGTACTGGCATGTGATTGGCATGGGCACCACCCCTGAGGTTCACTCTATTTTTCTGGAG |
| | | | | | GGCCATACTTTCCTTGTGAGGAATCATAGACAGGCCTCTCTGGAGATTAGCCCTATTACATTTCTGACTGCTCAGACCCTC |
| | | | | | CTCATGGACTTGGGGCAGTTTCTGTTAAGCTGCCACATCAGCAGCCATCAACATGATGGTATGGAAGCCTATGTCAAAG |
| | | | | | TGGATAGCTGCCCTGAAGAACCACAGCTTAGGATGAAGAACAATGAGGAGGCAGAGGACTATGATGATGATCTGACTG |
| | | | | | ATTCTGAAATGGATGTGGTGAGATTTGATGATGATAATAGCCCTTCCTTTATCCAGATCAGGTCAGTGGCCAAGAAGCA |
| | | | | | CCCAAAGACCTGGGTGCATTATATTGCTGCTGAGGAGGAGGACTGGGACTATGCCCCTCTGGTGCTGGCCCCTGATGAT |
| | | | | | AGAAGCTATAAGTCTCAATACTTGAATAATGGCCCACAGAGGATTGGGAGAAAGTACAAAAAGGTGAGATTTATGGCC |
| | | | | | TACACTGATGAGACTTTCAAGACCAGAGAGGCCATCCAGCATGAATCAGGCATTTTGGGTCCCCTGCTGTATGGAGAGG |
| | | | | | TGGGGGATACCCTGCTGATCATCTTTAAGAACCAGGCCAGCAGACCTTACAACATTTACCCTCATGGGATCACAGATGT |
| | | | | | GAGGCCACTCTACTCTAGGAGATTGCCCAAGGGAGTCAAGCATCTTAAGGACTTTCCAATCCTGCCTGGGGAGATCTTC |
| | | | | | AAGTACAAATGGACAGTGACAGTTGAGGATGGACCTACTAAGAGTGACCCCAGGTGTCTGACCAGATATTACTCTAGCT |
| | | | | | TTGTCAATATGGAAAGAGACCTGGCTTCAGGCTTGATAGGCCCTCTTCTCATCTGCTACAAAGAGTCTGTGGACCAGAG |
| | | | | | AGGAAATCAGATTATGTCTGACAAGAGAAATGTTATTCTGTTTTCAGTCTTTGATGAGAACAGAAGTTGGTACTTGACAG |
| | | | | | AGAACATTCAGAGATTTCTGCCTAACCCTGCAGGAGTGCAGCTTGAGGACCCTGAGTTTCAGGCTTCCAATATCATGCAT |
| | | | | | TCTATCAATGGCTATGTGTTTGATAGCCTGCAGCTGTCTGTGTGCCTGCATGAGGTTGCCTATTGGTACATCCTGTCTATT |
| | | | | | GGGGCCCAAACTGATTTCTTGTCTGTGTTTTTCAGTGGATATACCTTTAAGCATAAGATGGTGTATGAAGATACCTTGAC |
| | | | | | ACTTTTCCCTTTCTCAGGAGAGACTGTCTTCATGTCTATGGAGAACCCTGGACTGTGGATCCTGGGATGCCACAACTCAG |
| | | | | | ACTTCAGAAACAGGGGTATGACAGCTCTGCTTAAGGTCTCCTCATGTGACAAAAATACAGGAGACTACTATGAAGATTC |
| | | | | | CTATGAGGACATCTCTGCTTACCTGCTCAGCAAAAACAATGCCATTGAGCCCAGAAGCTTCAGCCAGAATTCCAGACATC |
| | | | | | CCAGTACTAGGCAGAAGCAGTTTAATGCCACCACCATCCCAGAAAATGACATTGAGAAGACAGACCCTTGGTTTGCCCA |
| | | | | | TAGAACCCCAATGCCCAAGATTCAGAATGTGAGCAGCTCAGACTTGCTGATGCTGCTGAGGCAGTCTCCTACTCCCCATG |
| | | | | | GCCTGTCCCTCTCAGATCTGCAGGAAGCCAAGTATGAGACATTTTCTGATGACCCCTCCCCAGGGGCTATTGACAGTAAC |
| | | | | | AACAGCCTGTCTGAAATGACCCACTTCAGACCTCAGCTCCACCACAGTGGGGATATGGTGTTTACCCCAGAGTCAGGCC |
| | | | | | TGCAGCTGAGACTGAATGAGAAGCTGGGAACCACAGCTGCCACAGAACTGAAGAAGCTGGATTTCAAGGTGAGCTCTA |
| | | | | | CTTCAAATAATCTGATTTCCACTATCCCATCTGACAATTTGGCAGCTGGCACTGACAATACAAGCTCTCTGGGCCCACCTA |
| | | | | | GCATGCCAGTGCATTATGACAGCCAGTTGGACACCACTCTTTTTGGAAAGAAATCCAGTCCCCTGACAGAGTCAGGAGG |
| | | | | | ACCCCTTTCTCTGTCTGAGGAGAACAATGATAGTAAGCTTCTGGAGTCAGGCTTGATGAACTCCCAGGAGAGTTCTTGG |
| | | | | | GGCAAGAATGTGAGCTCTAGGGAGATCACCAGAACCACTCTGCAGTCTGACCAAGAAGAGATTGATTATGATGACACT |
| | | | | | ATCTCTGTTGAGATGAAGAAGGAGGACTTTGATATCTATGATGAGGATGAGAACCAGTCTCCAAGAAGTTTCCAGAAGA |
| | | | | | AGACCAGGCACTACTTTATTGCTGCTGTGGAGAGACTGTGGGACTATGGAATGTCCTCCTCCCCTCATGTCCTGAGAAAT |
| | | | | | AGAGCTCAGTCAGGATCAGTGCCCCAGTTCAAGAAGGTGGTGTTCCAGGAATTCACAGATGGAAGTTTTACCCAGCCAC |
| | | | | | TGTATAGAGGTGAACTGAATGAACATCTGGGTCTGCTGGGGCCCTATATCAGGGCTGAGGTGGAGGACAATATTATGG |
| | | | | | TGACCTTTAGAAACCAGGCCTCAAGGCCCTACAGCTTCTACTCTTCCCTCATTTCATATGAGGAAGACCAGAGACAGGGA |
| | | | | | GCAGAGCCTAGAAAGAACTTTGTCAAGCCCAATGAAACCAAAACCTATTTCTGGAAGGTGCAGCACCACATGGCACCCA |
| | | | | | CCAAAGATGAGTTTGACTGCAAAGCCTGGGCCTATTTCTCAGATGTGGATCTGGAGAAGGATGTCCATTCAGGTCTGAT |
| | | | | | TGGACCACTCCTGGTGTGCCACACCAACACACTGAATCCAGCTCATGGCAGACAGGTGACAGTCCAGGAGTTTGCCCTG |
| | | | | | TTTTTCACTATTTTTGATGAGACCAAGAGCTGGTATTTTACAGAGAATATGGAAAGAAACTGCAGAGCCCCTTGTAATAT |
| | | | | | CCAGATGGAGGACCCAACCTTTAAGGAGAACTACAGGTTCCATGCCATCAATGGCTACATTATGGATACCCTGCCTGGC |
| | | | | | CTGGTTATGGCCCAGGATCAGAGGATCAGGTGGTATCTGCTGTCAATGGGCTCCAATGAGAACATTCATAGTATTCACT |
| | | | | | TTTCAGGACATGTGTTCACAGTGAGAAAGAAGGAGGAGTATAAGATGGCCCTCTATAATCTCTACCCAGGGGTGTTTGA |
| | | | | | GACAGTTGAGATGCTGCCATCTAAGGCAGGCATCTGGAGAGTGGAATGCCTCATTGGAGAGCACCTGCATGCTGGCAT |
| | | | | | GTCCACCCTGTTTCTGGTGTACTCCAACAAATGTCAGACCCCTCTTGGTATGGCCTCTGGCCACATTAGGGATTTCCAGAT |
| | | | | | TACTGCCAGTGGTCAGTATGGGCAGTGGGCCCCTAAGCTGGCCAGACTGCACTATTCTGGGAGCATCAATGCCTGGTCC |
| | | | | | ACCAAGGAACCTTTTTCTTGGATTAAAGTGGATCTGCTGGCCCCAATGATCATCCATGGGATCAAGACCCAGGGAGCTA |
| | | | | | GGCAGAAGTTCAGCAGCCTGTACATTAGTCAGTTCATCATTATGTACAGTCTGGATGGCAAAAAGTGGCAGACATACAG |
| | | | | | GGGCAATTCCACTGGAACCCTGATGGTGTTCTTTGGAAATGTGGATAGCAGTGGTATCAAGCACAACATTTTCAACCCTC |
| | | | | | CCATCATTGCCAGGTACATCAGACTGCATCCAACCCACTACAGCATTAGGAGCACCCTTAGGATGGAGCTCATGGGGTG |
| | | | | | TGACCTGAACTCTTGCTCTATGCCACTTGGAATGGAGAGCAAGGCCATCTCTGATGCCCAGATTACTGCTAGTTCCTACT |
| | | | | | TCACCAATATGTTTGCCACCTGGTCACCCAGCAAGGCCAGGCTGCACCTGCAGGGAAGGTCCAATGCTGGAGGCCTCA |
| | | | | | GGTGAACAATCCAAAGGAGTGGCTGCAGGTGGACTTCCAGAAGACTATGAAGGTGACAGGAGTGACCACTCAGGGAG |
| | | | | | TGAAGAGCCTGCTGACCTCCATGTATGTGAAGGAGTTTCTGATCTCCAGCTCCCAGGATGGCCACCAGTGGACCCTGTT |
| | | | | | CTTTCAGAATGGCAAGGTGAAGGTGTTTCAGGGGAATCAGGACTCCTTCACCCCAGTGGTGAATTCCCTGGATCCCCCT |
| | | | | | CTGCTGACCAGATACCTGAGAATCCACCCCCAGTCTTGGGTGCACCAGATTGCCCTTAGGATGGAGGTGCTGGGCTGTG |
| | | | | | AGGCCCAGGACCTGTACTGA |
| CpG-free human | | | | 397 | MQIELSTCFFLCLLRFCFSATRRYYLGAVELSWDYMQSDLGELPVDARFPPRVPKSFPFNTSVVYKKTLFVEFTDHLFNIAKPRP |
| hFVIII 226 | | | | | PWMGLLGPTIQAEVYDTVVITLKNMASHPVSLHAVGVSYWKASEGAEYDDQTSQREKEDDKVFPGGSHTYVWQVLKENG |
| Variant with | | | | | PMASDPLCLTYSYLSHVDLVKDLNSGLIGALLVCREGSLAKEKTQTLHKFILLFAVFDEGKSWHSETKNSLMQDRDAASARAW |
| F309S Mutation; | | | | | PKMHTVNGYVNRSLPGLIGCHRKSVYWHVIGMGTTPEVHSIFLEGHTFLVRNHRQASLEISPITFLTAQTLLMDLGQFLLSCHI |
| COOL optimized- | | | | | SSHQHDGMEAYVKVDSCPEEPQLRMKNNEEAEDYDDDLTDSEMDVVRFDDDNSPSFIQIRSVAKKHPKTWVHYIAAEEED |
| amino acid | | | | | WDYAPLVLAPDDRSYKSQYLNNGPQRIGRKYKKVRFMAYTDETFKTREAIQHESGILGPLLYGEVGDTLLIIFKNQASRPYNIYP |
| sequence | | | | | HGITDVRPLYSRRLPKGVKHLKDFPILPGEIFKYKWTVTVEDGPTKSDPRCLTRYYSSFVNMERDLASGLIGPLLICYKESVDQR |
| | | | | | GNQIMSDKRNVILFSVFDENRSWYLTENIQRFLPNPAGVQLEDPEFQASNIMHSINGYVFDSLQLSVCLHEVAYWYILSIGAQ |
| | | | | | TDFLSVFFSGYTFKHKMVYEDTLTLFPFSGETVFMSMENPGLWILGCHNSDFRNRGMTALLKVSSCDKNTGDYYEDSYEDISA |
| | | | | | YLLSKNNAIEPRSFSQNSRHPSTRQKQFNATTIPENDIEKTDPWFAHRTPMPKIQNVSSSDLLMLLRQSPTPHGLSLSDLQEAK |
| | | | | | YETFSDDPSPGAIDSNNSLSEMTHFRPQLHHSGDMVFTPESGLQLRLNEKLGTTAATELKKLDFKVSSTSNNLISTIPSDNLAA |
| | | | | | GTDNTSSLGPPSMPVHYDSQLDTTLFGKKSSPLTESGGPLSLSEENNDSKLLESGLMNSQESSWGKNVSSREITRTTLQSDQE |
| | | | | | EIDYDDTISVEMKKEDFDIYDEDENQSPRSFQKKTRHYFIAAVERLWDYGMSSSPHVLRNRAQSGSVPQFKKVVFQEFTDGSF |
| | | | | | TQPLYRGELNEHLGLLGPYIRAEVEDNIMVTFRNQASRPYSFYSSLISYEEDQRQGAEPRKNFVKPNETKTYFWKVQHHMAP |
| | | | | | TKDEFDCKAWAYFSDVDLEKDVHSGLIGPLLVCHTNTLNPANGRQVTVQEFALFFTIFDETKSWYFTENMERNCRAPCNIQM |
| | | | | | EDPTFKENYRFHAINGYIMDTLPGLVMAQDQRIRWYLLSMGSNENIHSIHFSGHVFTVRKKEEYKMALYNLYPGVFETVEML |
| | | | | | PSKAGIWRVECLIGEHLHAGMSTLFLVYSNKCQTPLGMASGHIRDFQITASGQYGQWAPKLARLHYSGSINAWSTKEPFSWI |
| | | | | | KVDLLAPMIIHGIKTQGARQKFSSLYISQFIIMYSLDGKKWQTYRGNSTGTLMVFFGNVDSSGIKHNIFNPPIIARYIRLHPTHYS |
| | | | | | IRSTLRMELMGCDLNSCSMPLGMESKAISDAQITASSYFTNMFATWSPSKARLHLQGRSNAWRPQVNNPKEWLQVDFQKT |
| | | | | | MKVTGVITQGVKSLLTSMYVKEFLISSSQDGHQWTLFFQNGKVKVFQGNQDSFTPVVNSLDPPLLTRYLRIHPQSWVHQIAL |
| | | | | | RMEVLGCEAQDLY- |

(iii) FVIII Therapeutic Proteins and Uses Thereof for the Treatment of Hemophilia A

[0181] The ceDNA vectors described herein can be used to deliver therapeutic FVIII proteins for treatment of hemophilia A associated with inappropriate expression of the FVIII protein and/or mutations within the FVIII proteins.

[0182] ceDNA vectors as described herein can be used to express any desired FVIII therapeutic protein. Exemplary therapeutic FVIII therapeutic proteins include but are not limited to any FVIII protein expressed by the sequences as set forth in Table 1 herein.

[0183] In one embodiment, the expressed FVIII therapeutic protein is functional for the treatment of a Hemophilia A. In some embodiments, FVIII therapeutic protein does not cause an immune system reaction.

[0184] In another embodiment, the ceDNA vectors encoding FVIII therapeutic protein or fragment thereof (e.g., functional fragment) can be used to generate a chimeric protein. Thus, it is specifically contemplated herein that a ceDNA vector expressing a chimeric protein can be administered to e.g., to any one or more tissues selected from: liver, kidneys, gallbladder, prostate, adrenal gland. In some embodiments, when a ceDNA vector expressing FVIII is administered to an infant, or administered to a subject in utero, one can administer a ceDNA vector expressing FVIII to any one or more tissues selected from: liver, adrenal gland, heart, intestine, lung, and stomach, or to a liver stem cell precursor thereof for the in vivo or ex vivo treatment of hemophilia A.

### Hemophilia:

[0185] Hemophilia A is a genetic deficiency in clotting factor VIII, which causes increased bleeding and usually affects males. In the majority of cases it is inherited as an X-linked recessive trait, though there are cases which arise from spontaneous mutations. In terms of the symptoms of hemophilia A, there are internal or external bleeding episodes. Individuals with more severe hemophilia suffer more severe and more frequent bleeding, while others with mild hemophilia typically suffer more minor symptoms except after surgery or serious trauma. Moderate hemophiliacs have variable symptoms which manifest along a spectrum between severe and mild forms.

[0186] Current treatments to prevent bleeding in people with hemophilia A involves Factor VIII medication. Most individuals with severe hemophilia require regular supplementation with intravenous recombinant or plasma concentrate Factor VIII. Recombinant blood clotting factor VIII is one of the most complex proteins for industrial manufacturing due to the low efficiency of its gene transcription, massive intracellular loss of its proprotein during post-translational processing, and the instability of the secreted protein. Mild hemophiliacs can manage their condition with desmopressin, a drug which releases stored factor VIII from blood vessel walls.

[0187] There are many complications related to treatment of hemophilia A. In children, an easily accessible intravenous port can be inserted to minimize frequent traumatic intravenous cannulation. However, these ports are associated with high infection rate and a risk of clots forming at the tip of the catheter, rendering it useless. Viral infections can be common in hemophiliacs due to frequent blood transfusions which put patients at risk of acquiring blood borne infections, such as HIV, hepatitis B and hepatitis C. Prion infections can also be transmitted by blood transfusions. Another therapeutic complication of hemophilia A is the development of inhibitor antibodies against factor VIII due to frequent infusions. These develop as the body recognizes the infused factor VIII as foreign, as the body does not produce its own copy. In these individuals, activated factor VII, a precursor to factor VIII in the coagulation cascade, can be infused as a treatment for hemorrhage in individuals with hemophilia and antibodies against replacement factor VIII.

### Coagulation Cascade

[0188] Coagulation, also known as clotting, is the process by which blood changes from a liquid to a gel, forming a blood clot. It potentially results in hemostasis, the cessation of blood loss from a damaged vessel, followed by repair. The mechanism of coagulation involves activation, adhesion and aggregation of platelets along with deposition and maturation of fibrin. Disorders of coagulation are disease states which can result in bleeding (hemorrhage or bruising) or obstructive clotting (thrombosis).

[0189] Coagulation begins almost instantly after an injury to the blood vessel has damaged the endothelium lining the blood vessel. Exposure of blood to the subendothelial space initiates two processes: changes in platelets, and the exposure of subendothelial tissue factor to plasma Factor VII, which ultimately leads to fibrin formation. Platelets immediately form a plug at the site of injury; this is called primary hemostasis. Secondary hemostasis occurs simultaneously: additional coagulation factors or clotting factors beyond Factor VII (including Factor VIII) respond in a complex cascade to form fibrin strands, which strengthen the platelet plug.

[0190] The coagulation cascade of secondary hemostasis has two initial pathways which lead to fibrin formation. These are the contact activation pathway (also known as the intrinsic pathway), and the tissue factor pathway (also known as the extrinsic pathway), which both lead to the same fundamental reactions that produce fibrin. The primary pathway for the initiation of blood coagulation is the tissue factor (extrinsic) pathway. The pathways are a series of reactions, in which a zymogen (inactive enzyme precursor) of a serine protease and its glycoprotein co-factor are activated to become active components that then catalyze the next reaction in the cascade, ultimately resulting in cross-linked fibrin. Coagulation factors are generally indicated by Roman numerals, with a lowercase a appended to indicate an active form.

[0191] The coagulation factors are generally serine proteases (enzymes), which act by cleaving downstream proteins. The exceptions are tissue factor, FV, FVIII, FXIII. Tissue factor, FV and FVIII are glycoproteins, and Factor XIII is a transglutaminase. The coagulation factors circulate as inactive zymogens. The coagulation cascade is therefore classically divided into three pathways. The tissue factor and contact activation pathways both activate the “final common pathway” of factor X, thrombin and fibrin.

[0192] The main role of the tissue factor (extrinsic) pathway is to generate a “thrombin burst”, a process by which thrombin, the most important constituent of the coagulation cascade in terms of its feedback activation roles, is released very rapidly. FVIIa circulates in a higher amount than any other activated coagulation factor. The process includes the following steps:
[0193] Step 1: Following damage to the blood vessel, FVII leaves the circulation and comes into contact with tissue factor (TF) expressed on tissue-factor-bearing cells (stromal fibroblasts and leukocytes), forming an activated complex (TF-FVIIa).
[0194] Step 2: TF-FVIIa activates FIX and FX.
[0195] Step 3: FVII is itself activated by thrombin, FXIa, FXII and FXa.
[0196] Step 4: The activation of FX (to form FXa) by TF-FVIIa is almost immediately inhibited by tissue factor pathway inhibitor (TFPI).
[0197] Step 5: FXa and its co-factor FVa form the prothrombinase complex, which activates prothrombin to thrombin.
[0198] Step 6: Thrombin then activates other components of the coagulation cascade, including FV and FVIII (which forms a complex with FIX), and activates and releases FVIII from being bound to von Willebrand factor (vWF).
[0199] Step 7: FVIIIa is the co-factor of FIXa, and together they form the “tenase” complex, which activates FX; and so the cycle continues.

[0200] The contact activation (intrinsic) pathway begins with formation of the primary complex on collagen by high-molecular-weight kininogen (HMWK), prekallikrein, and FXII (Hageman factor). Prekallikrein is converted to kallikrein and FXII becomes FXIIa. FXIIa converts FXI into FXIa. Factor XIa activates FIX, which with its co-factor FVIIIa form the tenase complex, which activates FX to FXa. The minor role that the contact activation pathway has in initiating clot formation can be illustrated by the fact that patients with severe deficiencies of FXII, HMWK, and prekallikrein do not have a bleeding disorder. Instead, contact activation system is more involved in inflammation, and innate immunity.

[0201] The final common pathway shared by the intrinsic and extrinsic coagulation pathways involves the conversion of prothrombin into thrombin and fibrinogen into fibrin. Thrombin has a large array of functions, not only the conversion of fibrinogen to fibrin, the building block of a hemostatic plug. In addition, it is the most important platelet activator and on top of that it activates Factors VIII and V and their inhibitor protein C (in the presence of thrombomodulin), and it activates Factor XIII, which forms covalent bonds that crosslink the fibrin polymers that form from activated monomers.

[0202] Following activation by the contact factor or tissue factor pathways, the coagulation cascade is maintained in a prothrombotic state by the continued activation of FVIII and FIX to form the tenase complex, until it is down-regulated by the anticoagulant pathways. The methods comprise administering to the subject an effective amount of a composition comprising a ceDNA vector encoding the FVIII therapeutic protein or fragment thereof (e.g., functional fragment) as described herein. As will be appreciated by a skilled practitioner, the term “effective amount” refers to the amount of the ceDNA composition administered that results in expression of the protein in a “therapeutically effective amount” for the treatment of a disease or disorder.

[0203] The dosage ranges for the composition comprising a ceDNA vector encoding the FVIII therapeutic protein or fragment thereof (e.g., functional fragment) depends upon the potency (e.g., efficiency of the promoter), and includes amounts large enough to produce the desired effect, e.g., expression of the desired FVIII therapeutic protein, for the treatment of Phenylketonuria (hemophilia A). The dosage should not be so large as to cause unacceptable adverse side effects. Generally, the dosage will vary with the particular characteristics of the ceDNA vector, expression efficiency and with the age, condition, and sex of the patient. The dosage can be determined by one of skill in the art and, unlike traditional AAV vectors, can also be adjusted by the individual physician in the event of any complication because ceDNA vectors do not comprise immune activating capsid proteins that prevent repeat dosing.

[0204] Administration of the ceDNA compositions described herein can be repeated for a limited period of time. In some embodiments, the doses are given periodically or by pulsed administration. In a preferred embodiment, the doses recited above are administered over several months. The duration of treatment depends upon the subject's clinical progress and responsiveness to therapy. Booster treatments overtime are contemplated. Further, the level of expression can be titrated as the subject grows.

[0205] An FVIII therapeutic protein can be expressed in a subject for at least 1 week, at least 2 weeks, at least 1 month, at least 2 months, at least 6 months, at least 12 months/one year, at least 2 years, at least 5 years, at least 10 years, at least 15 years, at least 20 years, at least 30 years, at least 40 years, at least 50 years or more. Long-term expression can be achieved by repeated administration of the ceDNA vectors described herein at predetermined or desired intervals.

[0206] As used herein, the term “therapeutically effective amount” is an amount of an expressed FVIII therapeutic protein, or functional fragment thereof that is sufficient to produce a statistically significant, measurable change in expression of a disease biomarker or reduction in a given disease symptom (see “Efficacy Measurement” below). Such effective amounts can be gauged in clinical trials as well as animal studies for a given ceDNA composition.

[0207] Precise amounts of the ceDNA vector required to be administered depend on the judgment of the practitioner and are particular to each individual. Suitable regimes for administration are also variable, but are typified by an initial administration followed by repeated doses at one or more intervals by a subsequent injection or other administration. Alternatively, continuous intravenous infusion sufficient to maintain concentrations in the blood in the ranges specified for in vivo therapies are contemplated, particularly for the treatment of acute diseases/disorders.

[0208] Agents useful in the methods and compositions described herein can be administered topically, intravenously (by bolus or continuous infusion), intracellular injection, intratissue injection, orally, by inhalation, intraperitoneally, intramuscularly, subcutaneously, intracavity, and can be delivered by peristaltic means, if desired, or by other means known by those skilled in the art. The agent can be administered systemically, if so desired. It can also be administered in utero.

[0209] The efficacy of a given treatment for hemophilia A, can be determined by the skilled clinician. However, a treatment is considered “effective treatment,” as the term is used herein, if any one or all of the signs or symptoms of the disease or disorder is/are altered in a beneficial manner, or other clinically accepted symptoms or markers of disease are improved, or ameliorated, e.g., by at least 10% following treatment with a ceDNA vector encoding FVIII, or a functional fragment thereof. Efficacy can also be measured by failure of an individual to worsen as assessed by stabilization of the disease, or the need for medical interventions (i.e., progression of the disease is halted or at least slowed). Methods of measuring these indicators are known to those of skill in the art and/or described herein. Treatment includes any treatment of a disease in an individual or an animal (some non-limiting examples include a human, or a mammal) and includes: (1) inhibiting the disease, e.g., arresting, or slowing progression of the disease or disorder; or (2) relieving the disease, e.g., causing regression of symptoms; and (3) preventing or reducing the likelihood of the development of the disease, or preventing secondary diseases/disorders associated with the disease, such as liver or kidney failure. An effective amount for the treatment of a disease means that amount which, when administered to a mammal in need thereof, is sufficient to result in effective treatment as that term is defined herein, for that disease.

[0210] Efficacy of an agent can be determined by assessing physical indicators that are particular to hemophilia A. Standard methods of analysis of hemophilia A indicators are known in the art.

[0211] In some embodiments, a ceDNA vector for expression of FVIII protein as disclosed herein can also encode co-factors or other polypeptides, sense or antisense oligonucleotides, or RNAs (coding or non-coding; e.g., siRNAs, shRNAs, micro-RNAs, and their antisense counterparts (e.g., antagoMiR)) that can be used in conjunction with the FVIII protein expressed from the ceDNA. Additionally, expression cassettes comprising sequence encoding an FVIII protein can also include an exogenous sequence that encodes a reporter protein to be used for experimental or diagnostic purposes, such as β-lactamase, β-galactosidase (LacZ), alkaline phosphatase, thymidine kinase, green fluorescent protein (GFP), chloramphenicol acetyltransferase (CAT), luciferase, and others well known in the art.

[0212] In one embodiment, the ceDNA vector comprises a nucleic acid sequence to express the FVIII protein that is functional for the treatment of hemophilia A. In a preferred embodiment, the therapeutic FVIII protein does not cause an immune system reaction, unless so desired.

Iii. ceDNA Vector in General for Use in Production of FVIII Therapeutic Proteins

[0213] Embodiments of the invention are based on methods and compositions comprising close ended linear duplexed (ceDNA) vectors that can express the FVIII transgene. In some embodiments, the transgene is a sequence encoding an FVIII protein. The ceDNA vectors for expression of FVIII protein as described herein are not limited by size, thereby permitting, for example, expression of all of the components necessary for expression of a transgene from a single vector. The ceDNA vector for expression of FVIII protein is preferably duplex, e.g. self-complementary, over at least a portion of the molecule, such as the expression cassette (e.g. ceDNA is not a double stranded circular molecule). The ceDNA vector has covalently closed ends, and thus is resistant to exonuclease digestion (e.g. exonuclease I or exonuclease III), e.g. for over an hour at 37° C.

[0214] In general, a ceDNA vector for expression of FVIII protein as disclosed herein, comprises in the 5′ to 3′ direction: a first adeno-associated virus (AAV) inverted terminal repeat (ITR), a nucleotide sequence of interest (for example an expression cassette as described herein) and a second AAV ITR. The ITR sequences selected from any of: (i) at least one WT ITR and at least one modified AAV inverted terminal repeat (mod-ITR) (e.g., asymmetric modified ITRs); (ii) two modified ITRs where the mod-ITR pair have a different three-dimensional spatial organization with respect to each other (e.g., asymmetric modified ITRs), or (iii) symmetrical or substantially symmetrical WT-WT ITR pair, where each WT-ITR has the same three-dimensional spatial organization, or (iv) symmetrical or substantially symmetrical modified ITR pair, where each mod-ITR has the same three-dimensional spatial organization.

[0215] Encompassed herein are methods and compositions comprising the ceDNA vector for FVIII protein production, which may further include a delivery system, such as but not limited to, a liposome nanoparticle delivery system. Non-limiting exemplary liposome nanoparticle systems encompassed for use are disclosed herein. In some aspects, the disclosure provides for a lipid nanoparticle comprising ceDNA and an ionizable lipid. For example, a lipid nanoparticle formulation that is made and loaded with a ceDNA vector obtained by the process is disclosed in International Application PCT/US2018/050042, filed on Sep. 7, 2018, which is incorporated herein.

[0216] The ceDNA vectors for expression of FVIII protein as disclosed herein have no packaging constraints imposed by the limiting space within the viral capsid. ceDNA vectors represent a viable eukaryotically-produced alternative to prokaryote-produced plasmid DNA vectors, as opposed to encapsulated AAV genomes. This permits the insertion of control elements, e.g., regulatory switches as disclosed herein, large transgenes, multiple transgenes etc.

[0217] FIG. 1A-1E show schematics of non-limiting, exemplary ceDNA vectors for expression of FVIII protein, or the corresponding sequence of ceDNA plasmids. ceDNA vectors for expression of FVIII protein are capsid-free and can be obtained from a plasmid encoding in this order: a first ITR, an expression cassette comprising a transgene and a second ITR. The expression cassette may include one or more regulatory sequences that allows and/or controls the expression of the transgene, e.g., where the expression cassette can comprise one or more of, in this order: an enhancer/promoter, an ORF reporter (transgene), a post-transcription regulatory element (e.g., WPRE), and a polyadenylation and termination signal (e.g., BGH polyA).

[0218] The expression cassette can also comprise an internal ribosome entry site (IRES) and/or a 2A element. The cis-regulatory elements include, but are not limited to, a promoter, a riboswitch, an insulator, a mir-regulatable element, a post-transcriptional regulatory element, a tissue- and cell type-specific promoter and an enhancer. In some embodiments the ITR can act as the promoter for the transgene, e.g., FVIII protein. In some embodiments, the ceDNA vector comprises additional components to regulate expression of the transgene, for example, a regulatory switch, which are described herein in the section entitled “Regulatory Switches” for controlling and regulating the expression of the FVIII protein, and can include if desired, a regulatory switch which is a kill switch to enable controlled cell death of a cell comprising a ceDNA vector.

[0219] The expression cassette can comprise more than 4000 nucleotides, 5000 nucleotides, 10,000 nucleotides or 20,000 nucleotides, or 30,000 nucleotides, or 40,000 nucleotides or 50,000 nucleotides, or any range between about 4000-10,000 nucleotides or 10,000-50,000 nucleotides, or more than 50,000 nucleotides. In some embodiments, the expression cassette can comprise a transgene in the range of 500 to 50,000 nucleotides in length. In some embodiments, the expression cassette can comprise a transgene in the range of 500 to 75,000 nucleotides in length. In some embodiments, the expression cassette can comprise a transgene which is in the range of 500 to 10,000 nucleotides in length. In some embodiments, the expression cassette can comprise a transgene which is in the range of 1000 to 10,000 nucleotides in length. In some embodiments, the expression cassette can comprise a transgene which is in the range of 500 to 5,000 nucleotides in length. The ceDNA vectors do not have the size limitations of encapsidated AAV vectors, thus enable delivery of a large-size expression cassette to provide efficient transgene expression. In some embodiments, the ceDNA vector is devoid of prokaryote-specific methylation.

[0220] ceDNA expression cassette can include, for example, an expressible exogenous sequence (e.g., open reading frame) or transgene that encodes a protein that is either absent, inactive, or insufficient activity in the recipient subject or a gene that encodes a protein having a desired biological or a therapeutic effect. The transgene can encode a gene product that can function to correct the expression of a defective gene or transcript. In principle, the expression cassette can include any gene that encodes a protein, polypeptide or RNA that is either reduced or absent due to a mutation or which conveys a therapeutic benefit when overexpressed is considered to be within the scope of the disclosure.

[0221] The expression cassette can comprise any transgene (e.g., encoding FVIII protein), for example, FVIII protein useful for treating hemophilia A in a subject, i.e., a therapeutic FVIII protein. A ceDNA vector can be used to deliver and express any FVIII protein of interest in the subject, alone or in combination with nucleic acids encoding polypeptides, or non-coding nucleic acids (e.g., RNAi, miRs etc.), as well as exogenous genes and nucleotide sequences, including virus sequences in a subjects' genome, e.g., HIV virus sequences and the like. Preferably a ceDNA vector disclosed herein is used for therapeutic purposes (e.g., for medical, diagnostic, or veterinary uses) or immunogenic polypeptides. In certain embodiments, a ceDNA vector is useful to express any gene of interest in the subject, which includes one or more polypeptides, peptides, ribozymes, peptide nucleic acids, siRNAs, RNAis, antisense oligonucleotides, antisense polynucleotides, or RNAs (coding or non-coding; e.g., siRNAs, shRNAs, micro-RNAs, and their antisense counterparts (e.g., antagoMiR)), antibodies, fusion proteins, or any combination thereof.

[0222] The expression cassette can also encode polypeptides, sense or antisense oligonucleotides, or RNAs (coding or non-coding; e.g., siRNAs, shRNAs, micro-RNAs, and their antisense counterparts (e.g., antagoMiR)). Expression cassettes can include an exogenous sequence that encodes a reporter protein to be used for experimental or diagnostic purposes, such as β-lactamase, β-galactosidase (LacZ), alkaline phosphatase, thymidine kinase, green fluorescent protein (GFP), chloramphenicol acetyltransferase (CAT), luciferase, and others well known in the art.

[0223] Sequences provided in the expression cassette, expression construct of a ceDNA vector for expression of FVIII protein described herein can be codon optimized for the target host cell. As used herein, the term “codon optimized” or “codon optimization” refers to the process of modifying a nucleic acid sequence for enhanced expression in the cells of the vertebrate of interest, e.g., mouse or human, by replacing at least one, more than one, or a significant number of codons of the native sequence (e.g., a prokaryotic sequence) with codons that are more frequently or most frequently used in the genes of that vertebrate. Various species exhibit particular bias for certain codons of a particular amino acid. Typically, codon optimization does not alter the amino acid sequence of the original translated protein. Optimized codons can be determined using e.g., Aptagen's Gene Forge® codon optimization and custom gene synthesis platform (Aptagen, Inc., 2190 Fox Mill Rd. Suite 300, Herndon, Va. 20171) or another publicly available database. In some embodiments, the nucleic acid encoding the FVIII protein is optimized for human expression, and/or is a human FVIII, or functional fragment thereof, as known in the art.

[0224] A transgene expressed by the ceDNA vector for expression of FVIII protein as disclosed herein encodes FVIII protein. There are many structural features of ceDNA vectors for expression of FVIII protein that differ from plasmid-based expression vectors. ceDNA vectors may possess one or more of the following features: the lack of original (i.e. not inserted) bacterial DNA, the lack of a prokaryotic origin of replication, being self-containing, i.e., they do not require any sequences other than the two ITRs, including the Rep binding and terminal resolution sites (RBS and TRS), and an exogenous sequence between the ITRs, the presence of ITR sequences that form hairpins, and the absence of bacterial-type DNA methylation or indeed any other methylation considered abnormal by a mammalian host. In general, it is preferred for the present vectors not to contain any prokaryotic DNA but it is contemplated that some prokaryotic DNA may be inserted as an exogenous sequence, as a non-limiting example in a promoter or enhancer region. Another important feature distinguishing ceDNA vectors from plasmid expression vectors is that ceDNA vectors are single-strand linear DNA having closed ends, while plasmids are always double-strand DNA.

[0225] ceDNA vectors for expression of FVIII protein produced by the methods provided herein preferably have a linear and continuous structure rather than a non-continuous structure, as determined by restriction enzyme digestion assay (FIG. 4D). The linear and continuous structure is believed to be more stable from attack by cellular endonucleases, as well as less likely to be recombined and cause mutagenesis. Thus, a ceDNA vector in the linear and continuous structure is a preferred embodiment. The continuous, linear, single strand intramolecular duplex ceDNA vector can have covalently bound terminal ends, without sequences encoding AAV capsid proteins. These ceDNA vectors are structurally distinct from plasmids (including ceDNA plasmids described herein), which are circular duplex nucleic acid molecules of bacterial origin. The complimentary strands of plasmids may be separated following denaturation to produce two nucleic acid molecules, whereas in contrast, ceDNA vectors, while having complimentary strands, are a single DNA molecule and therefore even if denatured, remain a single molecule. In some embodiments, ceDNA vectors as described herein can be produced without DNA base methylation of prokaryotic type, unlike plasmids. Therefore, the ceDNA vectors and ceDNA-plasmids are different both in term of structure (in particular, linear versus circular) and also in view of the methods used for producing and purifying these different objects (see below), and also in view of their DNA methylation which is of prokaryotic type for ceDNA-plasmids and of eukaryotic type for the ceDNA vector.

[0226] There are several advantages of using a ceDNA vector for expression of FVIII protein as described herein over plasmid-based expression vectors, such advantages include, but are not limited to: 1) plasmids contain bacterial DNA sequences and are subjected to prokaryotic-specific methylation, e.g., 6-methyl adenosine and 5-methyl cytosine methylation, whereas capsid-free AAV vector sequences are of eukaryotic origin and do not undergo prokaryotic-specific methylation; as a result, capsid-free AAV vectors are less likely to induce inflammatory and immune responses compared to plasmids; 2) while plasmids require the presence of a resistance gene during the production process, ceDNA vectors do not; 3) while a circular plasmid is not delivered to the nucleus upon introduction into a cell and requires overloading to bypass degradation by cellular nucleases, ceDNA vectors contain viral cis-elements, i.e., ITRs, that confer resistance to nucleases and can be designed to be targeted and delivered to the nucleus. It is hypothesized that the minimal defining elements indispensable for ITR function are a Rep-binding site (RBS; 5′-GCGCGCTCGCTCGCTC-3′ (SEQ ID NO: 60) for AAV2) and a terminal resolution site (TRS; 5′-AGTTGG-3′ (SEQ ID NO: 64) for AAV2) plus a variable palindromic sequence allowing for hairpin formation; and 4) ceDNA vectors do not have the over-representation of CpG dinucleotides often found in prokaryote-derived plasmids that reportedly binds a member of the Toll-like family of receptors, eliciting a T cell-mediated immune response. In contrast, transductions with capsid-free AAV vectors disclosed herein can efficiently target cell and tissue-types that are difficult to transduce with conventional AAV virions using various delivery reagent.

### IV. Inverted Terminal Repeats (ITRs)

[0227] As disclosed herein, ceDNA vectors for expression of FVIII protein contain a transgene or heterologous nucleic acid sequence positioned between two inverted terminal repeat (ITR) sequences, where the ITR sequences can be an asymmetrical ITR pair or a symmetrical- or substantially symmetrical ITR pair, as these terms are defined herein. A ceDNA vector as disclosed herein can comprise ITR sequences that are selected from any of: (i) at least one WT ITR and at least one modified AAV inverted terminal repeat (mod-ITR) (e.g., asymmetric modified ITRs); (ii) two modified ITRs where the mod-ITR pair have a different three-dimensional spatial organization with respect to each other (e.g., asymmetric modified ITRs), or (iii) symmetrical or substantially symmetrical WT-WT ITR pair, where each WT-ITR has the same three-dimensional spatial organization, or (iv) symmetrical or substantially symmetrical modified ITR pair, where each mod-ITR has the same three-dimensional spatial organization, where the methods of the present disclosure may further include a delivery system, such as but not limited to a liposome nanoparticle delivery system.

[0228] In some embodiments, the ITR sequence can be from viruses of the Parvoviridae family, which includes two subfamilies: Parvovirinae, which infect vertebrates, and Densovirinae, which infect insects. The subfamily Parvovirinae (referred to as the parvoviruses) includes the genus Dependovirus, the members of which, under most conditions, require coinfection with a helper virus such as adenovirus or herpes virus for productive infection. The genus Dependovirus includes adeno-associated virus (AAV), which normally infects humans (e.g., serotypes 2, 3A, 3B, 5, and 6) or primates (e.g., serotypes 1 and 4), and related viruses that infect other warm-blooded animals (e.g., bovine, canine, equine, and ovine adeno-associated viruses). The parvoviruses and other members of the Parvoviridae family are generally described in Kenneth I. Berns, “Parvoviridae: The Viruses and Their Replication,” Chapter 69 in FIELDS VIROLOGY (3d Ed. 1996).

[0229] While ITRs exemplified in the specification and Examples herein are AAV2 WT-ITRs, one of ordinary skill in the art is aware that one can as stated above use ITRs from any known parvovirus, for example a dependovirus such as AAV (e.g., AAV1, AAV2, AAV3, AAV4, AAV5, AAV 5, AAV7, AAV8, AAV9, AAV10, AAV 11, AAV12, AAVrh8, AAVrh10, AAV-DJ, and AAV-DJ8 genome. E.g., NCBI: NC 002077; NC 001401; NC001729; NC001829; NC006152; NC 006260; NC 006261), chimeric ITRs, or ITRs from any synthetic AAV. In some embodiments, the AAV can infect warm-blooded animals, e.g., avian (AAAV), bovine (BAAV), canine, equine, and ovine adeno-associated viruses. In some embodiments the ITR is from B19 parvovirus (GenBank Accession No: NC 000883), Minute Virus from Mouse (MVM) (GenBank Accession No. NC 001510); goose parvovirus (GenBank Accession No. NC 001701); snake parvovirus 1 (GenBank Accession No. NC 006148). In some embodiments, the 5′ WT-ITR can be from one serotype and the 3′ WT-ITR from a different serotype, as discussed herein.

[0230] An ordinarily skilled artisan is aware that ITR sequences have a common structure of a double-stranded Holliday junction, which typically is a T-shaped or Y-shaped hairpin structure (see e.g., FIG. 2A and FIG. 3A), where each WT-ITR is formed by two palindromic arms or loops (B-B′ and C-C′) embedded in a larger palindromic arm (A-A′), and a single stranded D sequence, (where the order of these palindromic sequences defines the flip or flop orientation of the ITR). See, for example, structural analysis and sequence comparison of ITRs from different AAV serotypes (AAV1-AAV6) and described in Grimm et al., J. Virology, 2006; 80(1); 426-439; Yan et al., J. Virology, 2005; 364-379; Duan et al., Virology 1999; 261; 8-14. One of ordinary skill in the art can readily determine WT-ITR sequences from any AAV serotype for use in a ceDNA vector or ceDNA-plasmid based on the exemplary AAV2 ITR sequences provided herein. See, for example, the sequence comparison of ITRs from different AAV serotypes (AAV1-AAV6, and avian AAV (AAAV) and bovine AAV (BAAV)) described in Grimm et al., J. Virology, 2006; 80(1); 426-439; that show the % identity of the left ITR of AAV2 to the left ITR from other serotypes: AAV-1 (84%), AAV-3 (86%), AAV-4 (79%), AAV-5 (58%), AAV-6 (left ITR) (100%) and AAV-6 (right ITR) (82%).

### A. Symmetrical ITR Pairs

[0231] In some embodiments, a ceDNA vector for expression of FVIII protein as described herein comprises, in the 5′ to 3′ direction: a first adeno-associated virus (AAV) inverted terminal repeat (ITR), a nucleotide sequence of interest (for example an expression cassette as described herein) and a second AAV ITR, where the first ITR (5′ ITR) and the second ITR (3′ ITR) are symmetric, or substantially symmetrical with respect to each other—that is, a ceDNA vector can comprise ITR sequences that have a symmetrical three-dimensional spatial organization such that their structure is the same shape in geometrical space, or have the same A, C-C′ and B-B′ loops in 3D space. In such an embodiment, a symmetrical ITR pair, or substantially symmetrical ITR pair can be modified ITRs (e.g., mod-ITRs) that are not wild-type ITRs. A mod-ITR pair can have the same sequence which has one or more modifications from wild-type ITR and are reverse complements (inverted) of each other. In alternative embodiments, a modified ITR pair are substantially symmetrical as defined herein, that is, the modified ITR pair can have a different sequence but have corresponding or the same symmetrical three-dimensional shape.

### (i) Wildtype ITRs

[0232] In some embodiments, the symmetrical ITRs, or substantially symmetrical ITRs are wild type (WT-ITRs) as described herein. That is, both ITRs have a wild type sequence, but do not necessarily have to be WT-ITRs from the same AAV serotype. That is, in some embodiments, one WT-ITR can be from one AAV serotype, and the other WT-ITR can be from a different AAV serotype. In such an embodiment, a WT-ITR pair are substantially symmetrical as defined herein, that is, they can have one or more conservative nucleotide modification while still retaining the symmetrical three-dimensional spatial organization.

[0233] Accordingly, as disclosed herein, ceDNA vectors contain a transgene or heterologous nucleic acid sequence positioned between two flanking wild-type inverted terminal repeat (WT-ITR) sequences, that are either the reverse complement (inverted) of each other, or alternatively, are substantially symmetrical relative to each other—that is a WT-ITR pair have symmetrical three-dimensional spatial organization. In some embodiments, a wild-type ITR sequence (e.g. AAV WT-ITR) comprises a functional Rep binding site (RBS; e.g. 5′-GCGCGCTCGCTCGCTC-3′ for AAV2, SEQ ID NO: 60) and a functional terminal resolution site (TRS; e.g. 5′-AGTT-3′, SEQ ID NO: 62).

[0234] In one aspect, ceDNA vectors for expression of FVIII protein are obtainable from a vector polynucleotide that encodes a heterologous nucleic acid operatively positioned between two WT inverted terminal repeat sequences (WT-ITRs) (e.g. AAV WT-ITRs). That is, both ITRs have a wild type sequence, but do not necessarily have to be WT-ITRs from the same AAV serotype. That is, in some embodiments, one WT-ITR can be from one AAV serotype, and the other WT-ITR can be from a different AAV serotype. In such an embodiment, the WT-ITR pair are substantially symmetrical as defined herein, that is, they can have one or more conservative nucleotide modification while still retaining the symmetrical three-dimensional spatial organization. In some embodiments, the 5′ WT-ITR is from one AAV serotype, and the 3′ WT-ITR is from the same or a different AAV serotype. In some embodiments, the 5′ WT-ITR and the 3′WT-ITR are mirror images of each other, that is they are symmetrical. In some embodiments, the 5′ WT-ITR and the 3′ WT-ITR are from the same AAV serotype.

[0235] WT ITRs are well known. In one embodiment the two ITRs are from the same AAV2 serotype. In certain embodiments one can use WT from other serotypes. There are a number of serotypes that are homologous, e.g. AAV2, AAV4, AAV6, AAV8. In one embodiment, closely homologous ITRs (e.g. ITRs with a similar loop structure) can be used. In another embodiment, one can use AAV WT ITRs that are more diverse, e.g., AAV2 and AAV5, and still another embodiment, one can use an ITR that is substantially WT—that is, it has the basic loop structure of the WT but some conservative nucleotide changes that do not alter or affect the properties. When using WT-ITRs from the same viral serotype, one or more regulatory sequences may further be used. In certain embodiments, the regulatory sequence is a regulatory switch that permits modulation of the activity of the ceDNA, e.g., the expression of the encoded FVIII protein.

[0236] In some embodiments, one aspect of the technology described herein relates to a ceDNA vector for expression of FVIII protein, wherein the ceDNA vector comprises at least one heterologous nucleotide sequence encoding the FVIII protein, operably positioned between two wild-type inverted terminal repeat sequences (WT-ITRs), wherein the WT-ITRs can be from the same serotype, different serotypes or substantially symmetrical with respect to each other (i.e., have the symmetrical three-dimensional spatial organization such that their structure is the same shape in geometrical space, or have the same A, C-C′ and B-B′ loops in 3D space). In some embodiments, the symmetric WT-ITRs comprises a functional terminal resolution site and a Rep binding site. In some embodiments, the heterologous nucleic acid sequence encodes a transgene, and wherein the vector is not in a viral capsid.

[0237] In some embodiments, the WT-ITRs are the same but the reverse complement of each other. For example, the sequence AACG in the 5′ ITR may be CGTT (i.e., the reverse complement) in the 3′ ITR at the corresponding site. In one example, the 5′ WT-ITR sense strand comprises the sequence of ATCGATCG and the corresponding 3′ WT-ITR sense strand comprises CGATCGAT (i.e., the reverse complement of ATCGATCG). In some embodiments, the WT-ITRs ceDNA further comprises a terminal resolution site and a replication protein binding site (RPS) (sometimes referred to as a replicative protein binding site), e.g. a Rep binding site.

[0238] Exemplary WT-ITR sequences for use in the ceDNA vectors for expression of FVIII protein comprising WT-ITRs are shown in Table 3 herein, which shows pairs of WT-ITRs (5′ WT-ITR and the 3′ WT-ITR).

[0239] As an exemplary example, the present disclosure provides a ceDNA vector for expression of FVIII protein comprising a promoter operably linked to a transgene (e.g., heterologous nucleic acid sequence), with or without the regulatory switch, where the ceDNA is devoid of capsid proteins and is: (a) produced from a ceDNA-plasmid (e.g., see FIGS. 1F-1G) that encodes WT-ITRs, where each WT-ITR has the same number of intramolecularly duplexed base pairs in its hairpin secondary configuration (preferably excluding deletion of any AAA or TTT terminal loop in this configuration compared to these reference sequences), and (b) is identified as ceDNA using the assay for the identification of ceDNA by agarose gel electrophoresis under native gel and denaturing conditions in Example 1.

[0240] In some embodiments, the flanking WT-ITRs are substantially symmetrical to each other. In this embodiment the 5′ WT-ITR can be from one serotype of AAV, and the 3′ WT-ITR from a different serotype of AAV, such that the WT-ITRs are not identical reverse complements. For example, the 5′ WT-ITR can be from AAV2, and the 3′ WT-ITR from a different serotype (e.g. AAV1, 3, 4, 5, 6, 7, 8, 9, 10, 11, and 12. In some embodiments, WT-ITRs can be selected from two different parvoviruses selected from any to of: AAV1, AAV2, AAV3, AAV4, AAV5, AAV6, AAV7, AAV8, AAV9, AAV10, AAV11, AAV12, AAV13, snake parvovirus (e.g., royal python parvovirus), bovine parvovirus, goat parvovirus, avian parvovirus, canine parvovirus, equine parvovirus, shrimp parvovirus, porcine parvovirus, or insect AAV. In some embodiments, such a combination of WT ITRs is the combination of WT-ITRs from AAV2 and AAV6. In one embodiment, the substantially symmetrical WT-ITRs are when one is inverted relative to the other ITR at least 90% identical, at least 95% identical, at least 96% . . . 97% . . . 98% . . . 99% . . . 99.5% and all points in between, and has the same symmetrical three-dimensional spatial organization. In some embodiments, a WT-ITR pair are substantially symmetrical as they have symmetrical three-dimensional spatial organization, e.g., have the same 3D organization of the A, C-C′, B-B′ and D arms. In one embodiment, a substantially symmetrical WT-ITR pair are inverted relative to the other, and are at least 95% identical, at least 96% . . . 97% . . . 98% . . . 99% . . . 99.5% and all points in between, to each other, and one WT-ITR retains the Rep-binding site (RBS) of 5′-GCGCGCTCGCTCGCTC-3′ (SEQ ID NO: 60) and a terminal resolution site (TRS). In some embodiments, a substantially symmetrical WT-ITR pair are inverted relative to each other, and are at least 95% identical, at least 96% . . . 97% . . . 98% . . . 99% . . . 99.5% and all points in between, to each other, and one WT-ITR retains the Rep-binding site (RBS) of 5′-GCGCGCTCGCTCGCTC-3′ (SEQ ID NO: 60) and a terminal resolution site (TRS) and in addition to a variable palindromic sequence allowing for hairpin secondary structure formation. Homology can be determined by standard means well known in the art such as BLAST (Basic Local Alignment Search Tool), BLASTN at default setting.

[0241] In some embodiments, the structural element of the ITR can be any structural element that is involved in the functional interaction of the ITR with a large Rep protein (e.g., Rep 78 or Rep 68). In certain embodiments, the structural element provides selectivity to the interaction of an ITR with a large Rep protein, i.e., determines at least in part which Rep protein functionally interacts with the ITR. In other embodiments, the structural element physically interacts with a large Rep protein when the Rep protein is bound to the ITR. Each structural element can be, e.g., a secondary structure of the ITR, a nucleotide sequence of the ITR, a spacing between two or more elements, or a combination of any of the above. In one embodiment, the structural elements are selected from the group consisting of an A and an A′ arm, a B and a B′ arm, a C and a C′ arm, a D arm, a Rep binding site (RBE) and an RBE′ (i.e., complementary RBE sequence), and a terminal resolution sire (TRS).

[0242] By way of example only, Table 2 indicates exemplary combinations of WT-ITRs.

[0243] Table 2: Exemplary combinations of WT-ITRs from the same serotype or different serotypes, or different parvoviruses. The order shown is not indicative of the ITR position, for example, “AAV1, AAV2” demonstrates that the ceDNA can comprise a WT-AAV1 ITR in the 5′ position, and a WT-AAV2 ITR in the 3′ position, or vice versa, a WT-AAV2 ITR the 5′ position, and a WT-AAV1 ITR in the 3′ position. Abbreviations: AAV serotype 1 (AAV1), AAV serotype 2 (AAV2), AAV serotype 3 (AAV3), AAV serotype 4 (AAV4), AAV serotype 5 (AAV5), AAV serotype 6 (AAV6), AAV serotype 7 (AAV7), AAV serotype 8 (AAV8), AAV serotype 9 (AAV9), AAV serotype 10 (AAV10), AAV serotype 11 (AAV 11), or AAV serotype 12 (AAV12); AAVrh8, AAVrh10, AAV-DJ, and AAV-DJ8 genome (E.g., NCBI: NC 002077; NC 001401; NC001729; NC001829; NC006152; NC 006260; NC 006261), ITRs from warm-blooded animals (avian AAV (AAAV), bovine AAV (BAAV), canine, equine, and ovine AAV), ITRs from B19 parvoviris (GenBank Accession No: NC 000883), Minute Virus from Mouse (MVM) (GenBank Accession No. NC 001510); Goose: goose parvovirus (GenBank Accession No. NC 001701); snake: snake parvovirus 1 (GenBank Accession No. NC 006148).

TABLE 2

| | | | | |
|---|---|---|---|---|
| AAV1, AAV1 | AAV2, AAV2 | AAV3, AAV3 | AAV4, AAV4 | AAV5, AAV5 |
| AAV1, AAV2 | AAV2, AAV3 | AAV3, AAV4 | AAV4, AAV5 | AAV5, AAV6 |
| AAV1, AAV3 | AAV2, AAV4 | AAV3, AAV5 | AAV4, AAV6 | AAV5, AAV7 |
| AAV1, AAV4 | AAV2, AAV5 | AAV3, AAV6 | AAV4, AAV7 | AAV5, AAV8 |
| AAV1, AAV5 | AAV2, AAV6 | AAV3, AAV7 | AAV4, AAV8 | AAV5, AAV9 |
| AAV1, AAV6 | AAV2, AAV7 | AAV3, AAV8 | AAV4, AAV9 | AAV5, AAV10 |
| AAV1, AAV7 | AAV2, AAV8 | AAV3, AAV9 | AAV4, AAV10 | AAV5, AAV11 |
| AAV1, AAV8 | AAV2, AAV9 | AAV3, AAV10 | AAV4, AAV11 | AAV5, AAV12 |
| AAV1, AAV9 | AAV2, AAV10 | AAV3, AAV11 | AAV4, AAV12 | AAV5, AAVRH8 |
| AAV1, AAV10 | AAV2, AAV11 | AAV3, AAV12 | AAV4, AAVRH8 | AAV5, AAVRH10 |
| AAV1, AAV11 | AAV2, AAV12 | AAV3, AAVRH8 | AAV4, AAVRH10 | AAV5, AAV13 |
| AAV1, AAV12 | AAV2, AAVRH8 | AAV3, AAVRH10 | AAV4, AAV13 | AAV5, AAVDJ |
| AAV1, AAVRH8 | AAV2, AAVRH10 | AAV3, AAV13 | AAV4, AAVDJ | AAV5, AAVDJ8 |
| AAV1, AAVRH10 | AAV2, AAV13 | AAV3, AAVDJ | AAV4, AAVDJ8 | AAV5, AVIAN |
| AAV1, AAV13 | AAV2, AAVDJ | AAV3, AAVDJ8 | AAV4, AVIAN | AAV5, BOVINE |
| AAV1, AAVDJ | AAV2, AAVDJ8 | AAV3, AVIAN | AAV4, BOVINE | AAV5, CANINE |
| AAV1, AAVDJ8 | AAV2, AVIAN | AAV3, BOVINE | AAV4, CANINE | AAV5, EQUINE |
| AAV1, AVIAN | AAV2, BOVINE | AAV3, CANINE | AAV4, EQUINE | AAV5, GOAT |
| AAV1, BOVINE | AAV2, CANINE | AAV3, EQUINE | AAV4, GOAT | AAV5, SHRIMP |
| AAV1, CANINE | AAV2, EQUINE | AAV3, GOAT | AAV4, SHRIMP | AAV5, PORCINE |
| AAV1, EQUINE | AAV2, GOAT | AAV3, SHRIMP | AAV4, PORCINE | AAV5, INSECT |
| AAV1, GOAT | AAV2, SHRIMP | AAV3, PORCINE | AAV4, INSECT | AAV5, OVINE |
| AAV1, SHRIMP | AAV2, PORCINE | AAV3, INSECT | AAV4, OVINE | AAV5, B19 |
| AAV1, PORCINE | AAV2, INSECT | AAV3, OVINE | AAV4, B19 | AAV5, MVM |
| AAV1, INSECT | AAV2, OVINE | AAV3, B19 | AAV4, MVM | AAV5, GOOSE |
| AAV1, OVINE | AAV2, B19 | AAV3, MVM | AAV4, GOOSE | AAV5, SNAKE |
| AAV1, B19 | AAV2, MVM | AAV3, GOOSE | AAV4, SNAKE | |
| AAV1, MVM | AAV2, GOOSE | AAV3, SNAKE | | |
| AAV1, GOOSE | AAV2, SNAKE | | | |
| AAV1, SNAKE | | | | |
| AAV6, AAV6 | AAV7, AAV7 | AAV8, AAV8 | AAV9, AAV9 | AAV10, AAV10 |
| AAV6, AAV7 | AAV7, AAV8 | AAV8, AAV9 | AAV9, AAV10 | AAV10, AAV11 |
| AAV6, AAV8 | AAV7, AAV9 | AAV8, AAV10 | AAV9, AAV11 | AAV10, AAV12 |
| AAV6, AAV9 | AAV7, AAV10 | AAV8, AAV11 | AAV9, AAV12 | AAV10, AAVRH8 |
| AAV6, AAV10 | AAV7, AAV11 | AAV8, AAV12 | AAV9, AAVRH8 | AAV10, AAVRH10 |
| AAV6, AAV11 | AAV7, AAV12 | AAV8, AAVRH8 | AAV9, AAVRH10 | AAV10, AAV13 |
| AAV6, AAV12 | AAV7, AAVRH8 | AAV8, AAVRH10 | AAV9, AAV13 | AAV10, AAVDJ |
| AAV6, AAVRH8 | AAV7, AAVRH10 | AAV8, AAV13 | AAV9, AAVDJ | AAV10, AAVDJ8 |
| AAV6, AAVRH10 | AAV7, AAV13 | AAV8, AAVDJ | AAV9, AAVDJ8 | AAV10, AVIAN |
| AAV6, AAV13 | AAV7, AAVDJ | AAV8, AAVDJ8 | AAV9, AVIAN | AAV10, BOVINE |
| AAV6, AAVDJ | AAV7, AAVDJ8 | AAV8, AVIAN | AAV9, BOVINE | AAV10, CANINE |
| AAV6, AAVDJ8 | AAV7, AVIAN | AAV8, BOVINE | AAV9, CANINE | AAV10, EQUINE |
| AAV6, AVIAN | AAV7, BOVINE | AAV8, CANINE | AAV9, EQUINE | AAV10, GOAT |
| AAV6, BOVINE | AAV7, CANINE | AAV8, EQUINE | AAV9, GOAT | AAV10, SHRIMP |
| AAV6, CANINE | AAV7, EQUINE | AAV8, GOAT | AAV9, SHRIMP | AAV10, PORCINE |
| AAV6, EQUINE | AAV7, GOAT | AAV8, SHRIMP | AAV9, PORCINE | AAV10, INSECT |
| AAV6, GOAT | AAV7, SHRIMP | AAV8, PORCINE | AAV9, INSECT | AAV10, OVINE |
| AAV6, SHRIMP | AAV7, PORCINE | AAV8, INSECT | AAV9, OVINE | AAV10, B19 |
| AAV6, PORCINE | AAV7, INSECT | AAV8, OVINE | AAV9, B19 | AAV10, MVM |
| AAV6, INSECT | AAV7, OVINE | AAV8, B19 | AAV9, MVM | AAV10, GOOSE |
| AAV6, OVINE | AAV7, B19 | AAV8, MVM | AAV9, GOOSE | AAV10, SNAKE |
| AAV6, B19 | AAV7, MVM | AAV8, GOOSE | AAV9, SNAKE | |
| AAV6, MVM | AAV7, GOOSE | AAV8, SNAKE | | |
| AAV6, GOOSE | AAV7, SNAKE | | | |
| AAV6, SNAKE | | | | |
| AAV11, AAV11 | AAV12, AAV12 | AAVRH8, AAVRH8 | AAVRH10, AAVRH10 | AAV13, AAV13 |
| AAV11, AAV12 | AAV12, AAVRH8 | AAVRH8, AAVRH10 | AAVRH10, AAV13 | AAV13, AAVDJ |
| AAV11, AAVRH8 | AAV12, AAVRH10 | AAVRH8, AAV13 | AAVRH10, AAVDJ | AAV13, AAVDJ8 |
| AAV11, AAVRH10 | AAV12, AAV13 | AAVRH8, AAVDJ | AAVRH10, AAVDJ8 | AAV13, AVIAN |
| AAV11, AAV13 | AAV12, AAVDJ | AAVRH8, AAVDJ8 | AAVRH10, AVIAN | AAV13, BOVINE |
| AAV11, AAVDJ | AAV12, AAVDJ8 | AAVRH8, AVIAN | AAVRH10, BOVINE | AAV13, CANINE |
| AAV11, AAVDJ8 | AAV12, AVIAN | AAVRH8, BOVINE | AAVRH10, CANINE | AAV13, EQUINE |
| AAV11, AVIAN | AAV12, BOVINE | AAVRH8, CANINE | AAVRH10, EQUINE | AAV13, GOAT |
| AAV11, BOVINE | AAV12, CANINE | AAVRH8, EQUINE | AAVRH10, GOAT | AAV13, SHRIMP |
| AAV11, CANINE | AAV12, EQUINE | AAVRH8, GOAT | AAVRH10, SHRIMP | AAV13, PORCINE |
| AAV11, EQUINE | AAV12, GOAT | AAVRH8, SHRIMP | AAVRH10, PORCINE | AAV13, INSECT |
| AAV11, GOAT | AAV12, SHRIMP | AAVRH8, PORCINE | AAVRH10, INSECT | AAV13, OVINE |
| AAV11, SHRIMP | AAV12, PORCINE | AAVRH8, INSECT | AAVRH10, OVINE | AAV13, B19 |
| AAV11, PORCINE | AAV12, INSECT | AAVRH8, OVINE | AAVRH10, B19 | AAV13, MVM |
| AAV11, INSECT | AAV12, OVINE | AAVRH8, B19 | AAVRH10, MVM | AAV13, GOOSE |
| AAV11, OVINE | AAV12, B19 | AAVRH8, MVM | AAVRH10, GOOSE | AAV13, SNAKE |
| AAV11, B19 | AAV12, MVM | AAVRH8, GOOSE | AAVRH10, SNAKE | |
| AAV11, MVM | AAV12, GOOSE | AAVRH8, SNAKE | | |
| AAV11, GOOSE | AAV12, SNAKE | | | |
| AAV11, SNAKE | | | | |
| AAVDJ, AAVDJ | AAVDJ8, AVVDJ8 | AVIAN, AVIAN | BOVINE, BOVINE | CANINE, CANINE |
| AAVDJ, AAVDJ8 | AAVDJ8, AVIAN | AVIAN, BOVINE | BOVINE, CANINE | CANINE, EQUINE |
| AAVDJ, AVIAN | AAVDJ8, BOVINE | AVIAN, CANINE | BOVINE, EQUINE | CANINE, GOAT |
| AAVDJ, BOVINE | AAVDJ8, CANINE | AVIAN, EQUINE | BOVINE, GOAT | CANINE, SHRIMP |
| AAVDJ, CANINE | AAVDJ8, EQUINE | AVIAN, GOAT | BOVINE, SHRIMP | CANINE, PORCINE |
| AAVDJ, EQUINE | AAVDJ8, GOAT | AVIAN, SHRIMP | BOVINE, PORCINE | CANINE, INSECT |
| AAVDJ, GOAT | AAVDJ8, SHRIMP | AVIAN, PORCINE | BOVINE, INSECT | CANINE, OVINE |
| AAVDJ, SHRIMP | AAVDJ8, PORCINE | AVIAN, INSECT | BOVINE, OVINE | CANINE, B19 |
| AAVDJ, PORCINE | AAVDJ8, INSECT | AVIAN, OVINE | BOVINE, B19 | CANINE, MVM |
| AAVDJ, INSECT | AAVDJ8, OVINE | AVIAN, B19 | BOVINE, MVM | CANINE, GOOSE |
| AAVDJ, OVINE | AAVDJ8, B19 | AVIAN, MVM | BOVINE, GOOSE | CANINE, SNAKE |
| AAVDJ, B19 | AAVDJ8, MVM | AVIAN, GOOSE | BOVINE, SNAKE | |
| AAVDJ, MVM | AAVDJ8, GOOSE | AVIAN, SNAKE | | |
| AAVDJ, GOOSE | AAVDJ8, SNAKE | | | |
| AAVDJ, SNAKE | | | | |
| EQUINE, EQUINE | GOAT, GOAT | SHRIMP, SHRIMP | PORCINE, PORCINE | INSECT, INSECT |
| EQUINE, GOAT | GOAT, SHRIMP | SHRIMP, PORCINE | PORCINE, INSECT | INSECT, OVINE |
| EQUINE, SHRIMP | GOAT, PORCINE | SHRIMP, INSECT | PORCINE, OVINE | INSECT, B19 |
| EQUINE, PORCINE | GOAT, INSECT | SHRIMP, OVINE | PORCINE, B19 | INSECT, MVM |
| EQUINE, INSECT | GOAT, OVINE | SHRIMP, B19 | PORCINE, MVM | INSECT, GOOSE |
| EQUINE, OVINE | GOAT, B19 | SHRIMP, MVM | PORCINE, GOOSE | INSECT, SNAKE |
| EQUINE, B19 | GOAT, MVM | SHRIMP, GOOSE | PORCINE, SNAKE | |
| EQUINE, MVM | GOAT, GOOSE | SHRIMP, SNAKE | | |
| EQUINE, GOOSE | GOAT, SNAKE | | | |
| EQUINE, SNAKE | | | | |
| OVINE, OVINE | B19, B19 | MVM, MVM | GOOSE, GOOSE | SNAKE, SNAKE |
| OVINE, B19 | B19, MVM | MVM, GOOSE | GOOSE, SNAKE | |
| OVINE, MVM | B19, GOOSE | MVM, SNAKE | | |
| OVINE, GOOSE | B19, SNAKE | | | |
| OVINE, SNAKE | | | | |

[0244] By way of example only, Table 3 shows the sequences of exemplary WT-ITRs from some different AAV serotypes.

TABLE 3

| AAV | | |
|---|---|---|
| serotype | 5′ WT-ITR (LEFT) | 3′ WT-ITR (RIGHT) |
| AAV1 | 5′- | 5′- |
| | TTGCCCACTCCCTCTCTGCGCGCTCGC | TTACCCTAGTGATGGAGTTGCCCACTC |
| | TCGCTCGGTGGGGCCTGCGGACCAAA | CCTCTCTGCGCGCGTCGCTCGCTCGGT |
| | GGTCCGCAGACGGCAGAGGTCTCCTCT | GGGGCCGGCAGAGGAGACCTCTGCCG |
| | GCCGGCCCCACCGAGCGAGCGACGCG | TCTGCGGACCTTTGGTCCGCAGGCCCC |
| | CGCAGAGAGGGAGTGGGCAACTCCAT | ACCGAGCGAGCGAGCGCGCAGAGAGG |
| | CACTAGGGTAA-3′ | GAGTGGGCAA-3′ (SEQ ID NO: 10) |
| | (SEQ ID NO: 5) | |
| AAV2 | CCTGCAGGCAGCTGCGCGCTCGCTCGC | AGGAACCCCTAGTGATGGAGTTGGCCA |
| | TCACTGAGGCCGCCCGGGCAAAGCCC | CTCCCTCTCTGCGCGCTCGCTCGCTCAC |
| | GGGCGTCGGGCGACCTTTGGTCGCCCG | TGAGGCCGGGCGACCAAAGGTCGCCC |
| | GCCTCAGTGAGCGAGCGAGCGCGCAG | GACGCCCGGGCTTTGCCCGGGCGGCCT |
| | AGAGGGAGTGGCCAACTCCATCACTA | CAGTGAGCGAGCGAGCGCGCAGCTGC |
| | GGGGTTCCT (SEQ ID NO: 2) | CTGCAGG (SEQ ID NO: 1) |
| AAV3 | 5′- | 5′- |
| | TTGGCCACTCCCTCTATGCGCACTCGC | ATACCTCTAGTGATGGAGTTGGCCACT |
| | TCGCTCGGTGGGGCCTGGCGACCAAA | CCCTCTATGCGCACTCGCTCGCTCGGT |
| | GGTCGCCAGACGGACGTGGGTTTCCAC | GGGGCCGGACGTGGAAACCCACGTCC |
| | GTCCGGCCCCACCGAGCGAGCGAGTG | GTCTGGCGACCTTTGGTCGCCAGGCCC |
| | CGCATAGAGGGAGTGGCCAACTCCAT | CACCGAGCGAGCGAGTGCGCATAGAG |
| | CACTAGAGGTAT-3′ (SEQ ID NO: 6) | GGAGTGGCCAA-3′ (SEQ ID NO: 11) |
| AAV4 | 5′- | 5′- |
| | TTGGCCACTCCCTCTATGCGCGCTCGC | AGTTGGCCACATTAGCTATGCGCGCTC |
| | TCACTCACTCGGCCCTGGAGACCAAAG | GCTCACTCACTCGGCCCTGGAGACCAA |
| | GTCTCCAGACTGCCGGCCTCTGGCCGG | AGGTCTCCAGACTGCCGGCCTCTGGCC |
| | CAGGGCCGAGTGAGTGAGCGAGCGCG | GGCAGGGCCGAGTGAGTGAGCGAGCG |
| | CATAGAGGGAGTGGCCAACT-3′ (SEQ | CGCATAGAGGGAGTGGCCAA-3′ (SEQ |
| | ID NO: 7) | ID NO: 12) |
| AAV5 | 5′- | 5′- |
| | TCCCCCCTGTCGCGTTCGCTCGCTCGC | CTTACAAAACCCCCTTGCTTGAGAGTG |
| | TGGCTCGTTTGGGGGGGCGACGGCCA | TGGCACTCTCCCCCCTGTCGCGTTCGCT |
| | GAGGGCCGTCGTCTGGCAGCTCTTTGA | CGCTCGCTGGCTCGTTTGGGGGGGTGG |
| | GCTGCCACCCCCCCAAACGAGCCAGC | CAGCTCAAAGAGCTGCCAGACGACGG |
| | GAGCGAGCGAACGCGACAGGGGGGAG | CCCTCTGGCCGTCGCCCCCCCAAACGA |
| | AGTGCCACACTCTCAAGCAAGGGGGT | GCCAGCGAGCGAGCGAACGCGACAGG |
| | TTTGTAAG-3′ (SEQ ID NO: 8) | GGGGA-3′ (SEQ ID NO: 13) |
| AAV6 | 5′- | 5′- |
| | TTGCCCACTCCCTCTAATGCGCGCTCG | ATACCCCTAGTGATGGAGTTGCCCACT |
| | CTCGCTCGGTGGGGCCTGCGGACCAA | CCCTCTATGCGCGCTCGCTCGCTCGGT |
| | AGGTCCGCAGACGGCAGAGGTCTCCT | GGGGCCGGCAGAGGAGACCTCTGCCG |
| | CTGCCGGCCCCACCGAGCGAGCGAGC | TCTGCGGACCTTTGGTCCGCAGGCCCC |
| | GCGCATAGAGGGAGTGGGCAACTCCA | ACCGAGCGAGCGAGCGCGCATTAGAG |
| | TCACTAGGGGTAT-3′ (SEQ ID NO: 9) | GGAGTGGGCAA (SEQ ID NO: 14) |

[0245] In some embodiments, the nucleotide sequence of the WT-ITR sequence can be modified (e.g., by modifying 1, 2, 3, 4 or 5, or more nucleotides or any range therein), whereby the modification is a substitution for a complementary nucleotide, e.g., G for a C, and vice versa, and T for an A, and vice versa.

[0246] In certain embodiments of the present invention, the ceDNA vector for expression of FVIII protein does not have a WT-ITR consisting of the nucleotide sequence selected from any of: SEQ ID NOs: 1, 2, 5-14. In alternative embodiments of the present invention, if a ceDNA vector has a WT-ITR comprising the nucleotide sequence selected from any of: SEQ ID NOs: 1, 2, 5-14, then the flanking ITR is also WT and the ceDNA vector comprises a regulatory switch, e.g., as disclosed herein and in International application PCT/US18/49996 (e.g., see Table 11 of PCT/US18/49996). In some embodiments, the ceDNA vector for expression of FVIII protein comprises a regulatory switch as disclosed herein and a WT-ITR selected having the nucleotide sequence selected from any of the group consisting of: SEQ ID NO: 1, 2, 5-14.

[0247] The ceDNA vector for expression of FVIII protein as described herein can include WT-ITR structures that retains an operable RBE, TRS and RBE′ portion. FIG. 2A and FIG. 2B, using wild-type ITRs for exemplary purposes, show one possible mechanism for the operation of a TRS site within a wild type ITR structure portion of a ceDNA vector. In some embodiments, the ceDNA vector for expression of FVIII protein contains one or more functional WT-ITR polynucleotide sequences that comprise a Rep-binding site (RBS; 5′-GCGCGCTCGCTCGCTC-3′ (SEQ ID NO: 60) for AAV2) and a terminal resolution site (TRS; 5′-AGTT (SEQ ID NO: 62)). In some embodiments, at least one WT-ITR is functional. In alternative embodiments, where a ceDNA vector for expression of FVIII protein comprises two WT-ITRs that are substantially symmetrical to each other, at least one WT-ITR is functional and at least one WT-ITR is non-functional.

B. Modified ITRs (Mod-ITRs) in General for ceDNA Vectors Comprising Asymmetric ITR Pairs or Symmetric ITR Pairs

[0248] As discussed herein, a ceDNA vector for expression of FVIII protein can comprise a symmetrical ITR pair or an asymmetrical ITR pair. In both instances, one or both of the ITRs can be modified ITRs—the difference being that in the first instance (i.e., symmetric mod-ITRs), the mod-ITRs have the same three-dimensional spatial organization (i.e., have the same A-A′, C-C′ and B-B′ arm configurations), whereas in the second instance (i.e., asymmetric mod-ITRs), the mod-ITRs have a different three-dimensional spatial organization (i.e., have a different configuration of A-A′, C-C′ and B-B′ arms).

[0249] In some embodiments, a modified ITR is an ITRs that is modified by deletion, insertion, and/or substitution as compared to a wild-type ITR sequence (e.g. AAV ITR). In some embodiments, at least one of the ITRs in the ceDNA vector comprises a functional Rep binding site (RBS; e.g. 5′-GCGCGCTCGCTCGCTC-3′ for AAV2, SEQ ID NO: 60) and a functional terminal resolution site (TRS; e.g. 5′-AGTT-3′, SEQ ID NO: 62.) In one embodiment, at least one of the ITRs is a non-functional ITR. In one embodiment, the different or modified ITRs are not each wild type ITRs from different serotypes.

[0250] Specific alterations and mutations in the ITRs are described in detail herein, but in the context of ITRs, “altered” or “mutated” or “modified”, it indicates that nucleotides have been inserted, deleted, and/or substituted relative to the wild-type, reference, or original ITR sequence. The altered or mutated ITR can be an engineered ITR. As used herein, “engineered” refers to the aspect of having been manipulated by the hand of man. For example, a polypeptide is considered to be “engineered” when at least one aspect of the polypeptide, e.g., its sequence, has been manipulated by the hand of man to differ from the aspect as it exists in nature.

[0251] In some embodiments, a mod-ITR may be synthetic. In one embodiment, a synthetic ITR is based on ITR sequences from more than one AAV serotype. In another embodiment, a synthetic ITR includes no AAV-based sequence. In yet another embodiment, a synthetic ITR preserves the ITR structure described above although having only some or no AAV-sourced sequence. In some aspects, a synthetic ITR may interact preferentially with a wild type Rep or a Rep of a specific serotype, or in some instances will not be recognized by a wild-type Rep and be recognized only by a mutated Rep.

[0252] The skilled artisan can determine the corresponding sequence in other serotypes by known means. For example, determining if the change is in the A, A′, B, B′, C, C′ or D region and determine the corresponding region in another serotype. One can use BLAST® (Basic Local Alignment Search Tool) or other homology alignment programs at default status to determine the corresponding sequence. The invention further provides populations and pluralities of ceDNA vectors comprising mod-ITRs from a combination of different AAV serotypes—that is, one mod-ITR can be from one AAV serotype and the other mod-ITR can be from a different serotype. Without wishing to be bound by theory, in one embodiment one ITR can be from or based on an AAV2 ITR sequence and the other ITR of the ceDNA vector can be from or be based on any one or more ITR sequence of AAV serotype 1 (AAV1), AAV serotype 4 (AAV4), AAV serotype 5 (AAV5), AAV serotype 6 (AAV6), AAV serotype 7 (AAV7), AAV serotype 8 (AAV8), AAV serotype 9 (AAV9), AAV serotype 10 (AAV10), AAV serotype 11 (AAV 11), or AAV serotype 12 (AAV12).

[0253] Any parvovirus ITR can be used as an ITR or as a base ITR for modification. Preferably, the parvovirus is a dependovirus. More preferably AAV. The serotype chosen can be based upon the tissue tropism of the serotype. AAV2 has a broad tissue tropism, AAV1 preferentially targets to neuronal and skeletal muscle, and AAV5 preferentially targets neuronal, retinal pigmented epithelia, and photoreceptors. AAV6 preferentially targets skeletal muscle and lung. AAV8 preferentially targets liver, skeletal muscle, heart, and pancreatic tissues. AAV9 preferentially targets liver, skeletal and lung tissue. In one embodiment, the modified ITR is based on an AAV2 ITR.

[0254] More specifically, the ability of a structural element to functionally interact with a particular large Rep protein can be altered by modifying the structural element. For example, the nucleotide sequence of the structural element can be modified as compared to the wild-type sequence of the ITR. In one embodiment, the structural element (e.g., A arm, A′ arm, B arm, B′ arm, C arm, C′ arm, D arm, RBE, RBE′, and TRS) of an ITR can be removed and replaced with a wild-type structural element from a different parvovirus. For example, the replacement structure can be from AAV1, AAV2, AAV3, AAV4, AAV5, AAV6, AAV7, AAV8, AAV9, AAV10, AAV 11, AAV12, AAV13, snake parvovirus (e.g., royal python parvovirus), bovine parvovirus, goat parvovirus, avian parvovirus, canine parvovirus, equine parvovirus, shrimp parvovirus, porcine parvovirus, or insect AAV. For example, the ITR can be an AAV2 ITR and the A or A′ arm or RBE can be replaced with a structural element from AAV5. In another example, the ITR can be an AAV5 ITR and the C or C′ arms, the RBE, and the TRS can be replaced with a structural element from AAV2. In another example, the AAV ITR can be an AAV5 ITR with the B and B′ arms replaced with the AAV2 ITR B and B′ arms.

[0255] By way of example only, Table 4 indicates exemplary modifications of at least one nucleotide (e.g., a deletion, insertion and/or substitution) in regions of a modified ITR, where X is indicative of a modification of at least one nucleic acid (e.g., a deletion, insertion and/or substitution) in that section relative to the corresponding wild-type ITR. In some embodiments, any modification of at least one nucleotide (e.g., a deletion, insertion and/or substitution) in any of the regions of C and/or C′ and/or B and/or B′ retains three sequential T nucleotides (i.e., TTT) in at least one terminal loop. For example, if the modification results in any of: a single arm ITR (e.g., single C-C′ arm, or a single B-B′ arm), or a modified C-B′ arm or C′-B arm, or a two arm ITR with at least one truncated arm (e.g., a truncated C-C′ arm and/or truncated B-B′ arm), at least the single arm, or at least one of the arms of a two arm ITR (where one arm can be truncated) retains three sequential T nucleotides (i.e., TTT) in at least one terminal loop. In some embodiments, a truncated C-C′ arm and/or a truncated B-B′ arm has three sequential T nucleotides (i.e., TTT) in the terminal loop.

TABLE 4
Exemplary combinations of modifications of at least one nucleotide (e.g., a
deletion, insertion and/or substitution) to different B - B′ and C - C′
regions or arms of ITRs (X indicates a nucleotide modification, e.g.,
addition, deletion or substitution of at least one nucleotide in the region).

| B region | B′ region | C region | C’ region |
|---|---|---|---|
| X | | | |
| | X | | |
| X | X | | |
| | | X | |
| | | | X |
| | | X | X |
| X | | X | |
| X | | | X |
| | X | X | |
| | X | | X |
| X | X | X | |
| X | X | | X |
| X | | X | X |
| | X | X | X |
| X | X | X | X |

[0256] In some embodiments, mod-ITR for use in a ceDNA vector for expression of FVIII protein comprises an asymmetric ITR pair, or a symmetric mod-ITR pair as disclosed herein, can comprise any one of the combinations of modifications shown in Table 4, and also a modification of at least one nucleotide in any one or more of the regions selected from: between A′ and C, between C and C′, between C′ and B, between B and B′ and between B′ and A. In some embodiments, any modification of at least one nucleotide (e.g., a deletion, insertion and/or substitution) in the C or C′ or B or B′ regions, still preserves the terminal loop of the stem-loop. In some embodiments, any modification of at least one nucleotide (e.g., a deletion, insertion and/or substitution) between C and C′ and/or B and B′ retains three sequential T nucleotides (i.e., TTT) in at least one terminal loop. In alternative embodiments, any modification of at least one nucleotide (e.g., a deletion, insertion and/or substitution) between C and C′ and/or B and B′ retains three sequential A nucleotides (i.e., AAA) in at least one terminal loop. In some embodiments, a modified ITR for use herein can comprise any one of the combinations of modifications shown in Table 4, and also a modification of at least one nucleotide (e.g., a deletion, insertion and/or substitution) in any one or more of the regions selected from: A′, A and/or D. For example, in some embodiments, a modified ITR for use herein can comprise any one of the combinations of modifications shown in Table 4, and also a modification of at least one nucleotide (e.g., a deletion, insertion and/or substitution) in the A region. In some embodiments, a modified ITR for use herein can comprise any one of the combinations of modifications shown in Table 4, and also a modification of at least one nucleotide (e.g., a deletion, insertion and/or substitution) in the A′ region. In some embodiments, a modified ITR for use herein can comprise any one of the combinations of modifications shown in Table 4, and also a modification of at least one nucleotide (e.g., a deletion, insertion and/or substitution) in the A and/or A′ region. In some embodiments, a modified ITR for use herein can comprise any one of the combinations of modifications shown in Table 4, and also a modification of at least one nucleotide (e.g., a deletion, insertion and/or substitution) in the D region.

[0257] In one embodiment, the nucleotide sequence of the structural element can be modified (e.g., by modifying 1, 2, 3, 4, 5, 6, 7, 8, 9, 10, 11, 12, 13, 14, 15, 16, 17, 18, 19, or 20 or more nucleotides or any range therein) to produce a modified structural element. In one embodiment, the specific modifications to the ITRs are exemplified herein (e.g., SEQ ID NOS: 3, 4, 15-47, 101-116 or 165-187, or shown in FIG. 7A-7B of PCT/US2018/064242, filed on Dec. 6, 2018 (e.g., SEQ ID Nos 97-98, 101-103, 105-108, 111-112, 117-134, 545-54 in PCT/US2018/064242). In some embodiments, an ITR can be modified (e.g., by modifying 1, 2, 3, 4, 5, 6, 7, 8, 9, 10, 11, 12, 13, 14, 15, 16, 17, 18, 19, or 20 or more nucleotides or any range therein). In other embodiments, the ITR can have at least 80%, at least 85%, at least 90%, at least 95%, at least 96%, at least 97%, at least 98%, at least 99%, or more sequence identity with one of the modified ITRs of SEQ ID NOS: 3, 4, 15-47, 101-116 or 165-187, or the RBE-containing section of the A-A′ arm and C-C′ and B-B′ arms of SEQ ID NO: 3, 4, 15-47, 101-116 or 165-187, or shown in Tables 2-9 (i.e., SEQ ID NO: 110-112, 115-190, 200-468) of International application PCT/US18/49996, which is incorporated herein in its entirety by reference.

[0258] In some embodiments, a modified ITR can for example, comprise removal or deletion of all of a particular arm, e.g., all or part of the A-A′ arm, or all or part of the B-B′ arm or all or part of the C-C′ arm, or alternatively, the removal of 1, 2, 3, 4, 5, 6, 7, 8, 9 or more base pairs forming the stem of the loop so long as the final loop capping the stem (e.g., single arm) is still present (e.g., see ITR-21 in FIG. 7A of PCT/US2018/064242, filed Dec. 6, 2018). In some embodiments, a modified ITR can comprise the removal of 1, 2, 3, 4, 5, 6, 7, 8, 9 or more base pairs from the B-B′ arm. In some embodiments, a modified ITR can comprise the removal of 1, 2, 3, 4, 5, 6, 7, 8, 9 or more base pairs from the C-C′ arm (see, e.g., ITR-1 in FIG. 3B, or ITR-45 in FIG. 7A of PCT/US2018/064242, filed Dec. 6, 2018). In some embodiments, a modified ITR can comprise the removal of 1, 2, 3, 4, 5, 6, 7, 8, 9 or more base pairs from the C-C′ arm and the removal of 1, 2, 3, 4, 5, 6, 7, 8, 9 or more base pairs from the B-B′ arm. Any combination of removal of base pairs is envisioned, for example, 6 base pairs can be removed in the C-C′ arm and 2 base pairs in the B-B′ arm. As an illustrative example, FIG. 3B shows an exemplary modified ITR with at least 7 base pairs deleted from each of the C portion and the C′ portion, a substitution of a nucleotide in the loop between C and C′ region, and at least one base pair deletion from each of the B region and B′ regions such that the modified ITR comprises two arms where at least one arm (e.g., C-C′) is truncated. In some embodiments, the modified ITR also comprises at least one base pair deletion from each of the B region and B′ regions, such that the B-B′ arm is also truncated relative to WT ITR.

[0259] In some embodiments, a modified ITR can have between 1 and 50 (e.g. 1, 2, 3, 4, 5, 6, 7, 8, 9, 10, 11, 12, 13, 14, 15, 16, 17, 18, 19, 20, 21, 22, 23, 24, 25, 26, 27, 28, 29, 30, 31, 32, 33, 34, 35, 36, 37, 38, 39, 40, 41, 42, 43, 44, 45, 46, 47, 48, 49, or 50) nucleotide deletions relative to a full-length wild-type ITR sequence. In some embodiments, a modified ITR can have between 1 and 30 nucleotide deletions relative to a full-length WT ITR sequence. In some embodiments, a modified ITR has between 2 and 20 nucleotide deletions relative to a full-length wild-type ITR sequence.

[0260] In some embodiments, a modified ITR does not contain any nucleotide deletions in the RBE-containing portion of the A or A′ regions, so as not to interfere with DNA replication (e.g. binding to an RBE by Rep protein, or nicking at a terminal resolution site). In some embodiments, a modified ITR encompassed for use herein has one or more deletions in the B, B′, C, and/or C region as described herein.

[0261] In some embodiments, a ceDNA vector for expression of FVIII protein comprising a symmetric ITR pair or asymmetric ITR pair comprises a regulatory switch as disclosed herein and at least one modified ITR selected having the nucleotide sequence selected from any of the group consisting of: SEQ ID NO: 3, 4, 15-47, 101-116 or 165-187.

[0262] In another embodiment, the structure of the structural element can be modified. For example, the structural element a change in the height of the stem and/or the number of nucleotides in the loop. For example, the height of the stem can be about 2, 3, 4, 5, 6, 7, 8, or 9 nucleotides or more or any range therein. In one embodiment, the stem height can be about 5 nucleotides to about 9 nucleotides and functionally interacts with Rep. In another embodiment, the stem height can be about 7 nucleotides and functionally interacts with Rep. In another example, the loop can have 3, 4, 5, 6, 7, 8, 9, or 10 nucleotides or more or any range therein.

[0263] In another embodiment, the number of GAGY binding sites or GAGY-related binding sites within the RBE or extended RBE can be increased or decreased. In one example, the RBE or extended RBE, can comprise 1, 2, 3, 4, 5, or 6 or more GAGY binding sites or any range therein. Each GAGY binding site can independently be an exact GAGY sequence or a sequence similar to GAGY as long as the sequence is sufficient to bind a Rep protein.

[0264] In another embodiment, the spacing between two elements (such as but not limited to the RBE and a hairpin) can be altered (e.g., increased or decreased) to alter functional interaction with a large Rep protein. For example, the spacing can be about 1, 2, 3, 4, 5, 6, 7, 8, 9, 10, 11, 12, 13, 14, 15, 16, 17, 18, 19, 20, or 21 nucleotides or more or any range therein.

[0265] The ceDNA vector for expression of FVIII protein as described herein can include an ITR structure that is modified with respect to the wild type AAV2 ITR structure disclosed herein, but still retains an operable RBE, TRS and RBE′ portion. FIG. 2A and FIG. 2B show one possible mechanism for the operation of a TRS site within a wild type ITR structure portion of a ceDNA vector for expression of FVIII protein. In some embodiments, the ceDNA vector for expression of FVIII protein contains one or more functional ITR polynucleotide sequences that comprise a Rep-binding site (RBS; 5′-GCGCGCTCGCTCGCTC-3′ (SEQ ID NO: 60) for AAV2) and a terminal resolution site (TRS; 5′-AGTT (SEQ ID NO: 62)). In some embodiments, at least one ITR (wt or modified ITR) is functional. In alternative embodiments, where a ceDNA vector for expression of FVIII protein comprises two modified ITRs that are different or asymmetrical to each other, at least one modified ITR is functional and at least one modified ITR is non-functional.

[0266] In some embodiments, the modified ITR (e.g., the left or right ITR) of a ceDNA vector for expression of FVIII protein as described herein has modifications within the loop arm, the truncated arm, or the spacer. Exemplary sequences of ITRs having modifications within the loop arm, the truncated arm, or the spacer are listed in Table 2 (i.e., SEQ ID NOS: 135-190, 200-233); Table 3 (e.g., SEQ ID Nos: 234-263); Table 4 (e.g., SEQ ID NOs: 264-293); Table 5 (e.g., SEQ ID Nos: 294-318 herein); Table 6 (e.g., SEQ ID NO: 319-468; and Tables 7-9 (e.g., SEQ ID Nos: 101-110, 111-112, 115-134) or Table 10A or 10B (e.g., SEQ ID Nos: 9, 100, 469-483, 484-499) of International application PCT/US18/49996, which is incorporated herein in its entirety by reference.

[0267] In some embodiments, the modified ITR for use in a ceDNA vector for expression of FVIII protein comprising an asymmetric ITR pair, or symmetric mod-ITR pair is selected from any or a combination of those shown in Tables 2, 3, 4, 5, 6, 7, 8, 9 and 10A-10B of International application PCT/US18/49996 which is incorporated herein in its entirety by reference.

[0268] Additional exemplary modified ITRs for use in a ceDNA vector for expression of FVIII protein comprising an asymmetric ITR pair, or symmetric mod-ITR pair in each of the above classes are provided in Tables 5A and 5B. The predicted secondary structure of the Right modified ITRs in Table 5A are shown in FIG. 7A of International Application PCT/US2018/064242, filed Dec. 6, 2018, and the predicted secondary structure of the Left modified ITRs in Table 5B are shown in FIG. 7B of International Application PCT/US2018/064242, filed Dec. 6, 2018, which is incorporated herein in its entirety by reference.

[0269] Table 5A and Table 5B show exemplary right and left modified ITRs.

[0270] Table 5A: Exemplary modified right ITRs. These exemplary modified right ITRs can comprise the RBE of GCGCGCTCGCTCGCTC-3′ (SEQ ID NO: 60), spacer of ACTGAGGC (SEQ ID NO: 69), the spacer complement GCCTCAGT (SEQ ID NO: 70) and RBE′ (i.e., complement to RBE) of GAGCGAGCGAGCGCGC (SEQ ID NO: 71).

TABLE 5A
Exemplary Right modified ITRs

| ITR | | SEQ ID |
|---|---|---|
| Construct | Sequence | NO: |
| ITR-18 | AGGAACCCCTAGTGATGGAGTTGGCCACTCCCTCTCTGCGCGCTCG | 15 |
| Right | CTCGCTCACTGAGGCGCACGCCCGGGTTTCCCGGGCGGCCTCAGTG | |
| | AGCGAGCGAGCGCGCAGCTGCCTGCAGG | |
| ITR-19 | AGGAACCCCTAGTGATGGAGTTGGCCACTCCCTCTCTGCGCGCTCG | 16 |
| Right | CTCGCTCACTGAGGCCGACGCCCGGGCTTTGCCCGGGCGGCCTCA | |
| | GTGAGCGAGCGAGCGCGCAGCTGCCTGCAGG | |
| ITR-20 | AGGAACCCCTAGTGATGGAGTTGGCCACTCCCTCTCTGCGCGCTCG | 17 |
| Right | CTCGCTCACTGAGGCCGGGCGACCAAAGGTCGCCCGACGCCCGGG | |
| | CGCCTCAGTGAGCGAGCGAGCGCGCAGCTGCCTGCAGG | |
| ITR-21 | AGGAACCCCTAGTGATGGAGTTGGCCACTCCCTCTCTGCGCGCTCG | 18 |
| Right | CTCGCTCACTGAGGCTTTGCCTCAGTGAGCGAGCGAGCGCGCAGC | |
| | TGCCTGCAGG | |
| ITR-22 | AGGAACCCCTAGTGATGGAGTTGGCCACTCCCTCTCTGCGCGCTCG | 19 |
| Right | CTCGCTCACTGAGGCCGGGCGACAAAGTCGCCCGACGCCCGGGCT | |
| | TTGCCCGGGCGGCCTCAGTGAGCGAGCGAGCGCGCAGCTGCCTGC | |
| | AGG | |
| ITR-23 | AGGAACCCCTAGTGATGGAGTTGGCCACTCCCTCTCTGCGCGCTCG | 20 |
| Right | CTCGCTCACTGAGGCCGGGCGAAAATCGCCCGACGCCCGGGCTTT | |
| | GCCCGGGCGGCCTCAGTGAGCGAGCGAGCGCGCAGCTGCCTGCAG | |
| | G | |
| ITR-24 | AGGAACCCCTAGTGATGGAGTTGGCCACTCCCTCTCTGCGCGCTCG | 21 |
| Right | CTCGCTCACTGAGGCCGGGCGAAACGCCCGACGCCCGGGCTTTGC | |
| | CCGGGCGGCCTCAGTGAGCGAGCGAGCGCGCAGCTGCCTGCAGG | |
| ITR-25 | AGGAACCCCTAGTGATGGAGTTGGCCACTCCCTCTCTGCGCGCTCG | 22 |
| Right | CTCGCTCACTGAGGCCGGGCAAAGCCCGACGCCCGGGCTTTGCCC | |
| | GGGCGGCCTCAGTGAGCGAGCGAGCGCGCAGCTGCCTGCAGG | |
| ITR-26 | AGGAACCCCTAGTGATGGAGTTGGCCACTCCCTCTCTGCGCGCTCG | 23 |
| Right | CTCGCTCACTGAGGCCGGGCGACCAAAGGTCGCCCGACGCCCGGG | |
| | TTTCCCGGGCGGCCTCAGTGAGCGAGCGAGCGCGCAGCTGCCTGC | |
| | AGG | |
| ITR-27 | AGGAACCCCTAGTGATGGAGTTGGCCACTCCCTCTCTGCGCGCTCG | 24 |
| Right | CTCGCTCACTGAGGCCGGGCGACCAAAGGTCGCCCGACGCCCGGT | |
| | TTCCGGGCGGCCTCAGTGAGCGAGCGAGCGCGCAGCTGCCTGCAG | |
| | G | |
| ITR-28 | AGGAACCCCTAGTGATGGAGTTGGCCACTCCCTCTCTGCGCGCTCG | 25 |
| Right | CTCGCTCACTGAGGCCGGGCGACCAAAGGTCGCCCGACGCCCGTT | |
| | TCGGGCGGCCTCAGTGAGCGAGCGAGCGCGCAGCTGCCTGCAGG | |
| ITR-29 | AGGAACCCCTAGTGATGGAGTTGGCCACTCCCTCTCTGCGCGCTCG | 26 |
| Right | CTCGCTCACTGAGGCCGGGCGACCAAAGGTCGCCCGACGCCCTTT | |
| | GGGCGGCCTCAGTGAGCGAGCGAGCGCGCAGCTGCCTGCAGG | |
| ITR-30 | AGGAACCCCTAGTGATGGAGTTGGCCACTCCCTCTCTGCGCGCTCG | 27 |
| Right | CTCGCTCACTGAGGCCGGGCGACCAAAGGTCGCCCGACGCCTTTG | |
| | GCGGCCTCAGTGAGCGAGCGAGCGCGCAGCTGCCTGCAGG | |
| ITR-31 | AGGAACCCCTAGTGATGGAGTTGGCCACTCCCTCTCTGCGCGCTCG | 28 |
| Right | CTCGCTCACTGAGGCCGGGCGACCAAAGGTCGCCCGACGCTTTGC | |
| | GGCCTCAGTGAGCGAGCGAGCGCGCAGCTGCCTGCAGG | |
| ITR-32 | AGGAACCCCTAGTGATGGAGTTGGCCACTCCCTCTCTGCGCGCTCG | 29 |
| Right | CTCGCTCACTGAGGCCGGGCGACCAAAGGTCGCCCGACGTTTCGG | |
| | CCTCAGTGAGCGAGCGAGCGCGCAGCTGCCTGCAGG | |
| ITR-49 | AGGAACCCCTAGTGATGGAGTTGGCCACTCCCTCTCTGCGCGCTCG | 30 |
| Right | CTCGCTCACTGAGGCCGGGCGACCAAAGGTCGCCCGACGGCCTCA | |
| | GTGAGCGAGCGAGCGCGCAGCTGCCTGCAGG | |
| ITR-50 | AGGAACCCCTAGTGATGGAGTTGGCCACTCCCTCTCTGCGCGCTCG | 31 |
| right | CTCGCTCACTGAGGCCGGGCGACCAAAGGTCGCCCGACGCCCGGG | |
| | CGGCCTCAGTGAGCGAGCGAGCGCGCAGCTGCCTGCAGG | |

[0271] TABLE 5B: Exemplary modified left ITRs. These exemplary modified left ITRs can comprise the RBE of GCGCGCTCGCTCGCTC-3′ (SEQ ID NO: 60), spacer of ACTGAGGC (SEQ ID NO: 69), the spacer complement GCCTCAGT (SEQ ID NO: 70) and RBE complement (RBE′) of GAGCGAGCGAGCGCGC (SEQ ID NO: 71).

TABLE 5B
Exemplary modified left ITRs

| | | |
|---|---|---|
| ITR-33 | CCTGCAGGCAGCTGCGCGCTCGCTCGCTCACTGAGGCCGCCCGGG | 32 |
| Left | AAACCCGGGCGTGCGCCTCAGTGAGCGAGCGAGCGCGCAGAGAG | |
| | GGAGTGGCCAACTCCATCACTAGGGGTTCCT | |
| ITR-34 | CCTGCAGGCAGCTGCGCGCTCGCTCGCTCACTGAGGCCGTCGGGC | 33 |
| Left | GACCTTTGGTCGCCCGGCCTCAGTGAGCGAGCGAGCGCGCAGAGA | |
| | GGGAGTGGCCAACTCCATCACTAGGGGTTCCT | |
| ITR-35 | CCTGCAGGCAGCTGCGCGCTCGCTCGCTCACTGAGGCCGCCCGGG | 34 |
| Left | CAAAGCCCGGGCGTCGGCCTCAGTGAGCGAGCGAGCGCGCAGAG | |
| | AGGGAGTGGCCAACTCCATCACTAGGGGTTCCT | |
| ITR-36 | CCTGCAGGCAGCTGCGCGCTCGCTCGCTCACTGAGGCGCCCGGGC | 35 |
| Left | GTCGGGCGACCTTTGGTCGCCCGGCCTCAGTGAGCGAGCGAGCGC | |
| | GCAGAGAGGGAGTGGCCAACTCCATCACTAGGGGTTCCT | |
| ITR-37 | CCTGCAGGCAGCTGCGCGCTCGCTCGCTCACTGAGGCAAAGCCTC | 36 |
| Left | AGTGAGCGAGCGAGCGCGCAGAGAGGGAGTGGCCAACTCCATCA | |
| | CTAGGGGTTCCT | |
| ITR-38 | CCTGCAGGCAGCTGCGCGCTCGCTCGCTCACTGAGGCCGCCCGGG | 37 |
| Left | CAAAGCCCGGGCGTCGGGCGACTTTGTCGCCCGGCCTCAGTGAGC | |
| | GAGCGAGCGCGCAGAGAGGGAGTGGCCAACTCCATCACTAGGGGT | |
| | TCCT | |
| ITR-39 | CCTGCAGGCAGCTGCGCGCTCGCTCGCTCACTGAGGCCGCCCGGG | 38 |
| Left | CAAAGCCCGGGCGTCGGGCGATTTTCGCCCGGCCTCAGTGAGCGA | |
| | GCGAGCGCGCAGAGAGGGAGTGGCCAACTCCATCACTAGGGGTTC | |
| | CT | |
| ITR-40 | CCTGCAGGCAGCTGCGCGCTCGCTCGCTCACTGAGGCCGCCCGGG | 39 |
| Left | CAAAGCCCGGGCGTCGGGCGTTTCGCCCGGCCTCAGTGAGCGAGC | |
| | GAGCGCGCAGAGAGGGAGTGGCCAACTCCATCACTAGGGGTTCCT | |
| ITR-41 | CCTGCAGGCAGCTGCGCGCTCGCTCGCTCACTGAGGCCGCCCGGG | 40 |
| Left | CAAAGCCCGGGCGTCGGGCTTTGCCCGGCCTCAGTGAGCGAGCGA | |
| | GCGCGCAGAGAGGGAGTGGCCAACTCCATCACTAGGGGTTCCT | |
| ITR-42 | CCTGCAGGCAGCTGCGCGCTCGCTCGCTCACTGAGGCCGCCCGGG | 41 |
| Left | AAACCCGGGCGTCGGGCGACCTTTGGTCGCCCGGCCTCAGTGAGC | |
| | GAGCGAGCGCGCAGAGAGGGAGTGGCCAACTCCATCACTAGGGGT | |
| | TCCT | |
| ITR-43 | CCTGCAGGCAGCTGCGCGCTCGCTCGCTCACTGAGGCCGCCCGGA | 42 |
| Left | AACCGGGCGTCGGGCGACCTTTGGTCGCCCGGCCTCAGTGAGCGA | |
| | GCGAGCGCGCAGAGAGGGAGTGGCCAACTCCATCACTAGGGGTTC | |
| | CT | |
| ITR-44 | CCTGCAGGCAGCTGCGCGCTCGCTCGCTCACTGAGGCCGCCCGAA | 43 |
| Left | ACGGGCGTCGGGCGACCTTTGGTCGCCCGGCCTCAGTGAGCGAGC | |
| | GAGCGCGCAGAGAGGGAGTGGCCAACTCCATCACTAGGGGTTCCT | |
| ITR-45 | CCTGCAGGCAGCTGCGCGCTCGCTCGCTCACTGAGGCCGCCCAAA | 44 |
| Left | GGGCGTCGGGCGACCTTTGGTCGCCCGGCCTCAGTGAGCGAGCGA | |
| | GCGCGCAGAGAGGGAGTGGCCAACTCCATCACTAGGGGTTCCT | |
| ITR-46 | CCTGCAGGCAGCTGCGCGCTCGCTCGCTCACTGAGGCCGCCAAAG | 45 |
| Left | GCGTCGGGCGACCTTTGGTCGCCCGGCCTCAGTGAGCGAGCGAGC | |
| | GCGCAGAGAGGGAGTGGCCAACTCCATCACTAGGGGTTCCT | |
| ITR-47 | CCTGCAGGCAGCTGCGCGCTCGCTCGCTCACTGAGGCCGCAAAGC | 46 |
| Left | GTCGGGCGACCTTTGGTCGCCCGGCCTCAGTGAGCGAGCGAGCGC | |
| | GCAGAGAGGGAGTGGCCAACTCCATCACTAGGGGTTCCT | |
| ITR-48 | CCTGCAGGCAGCTGCGCGCTCGCTCGCTCACTGAGGCCGAAACGT | 47 |
| Left | CGGGCGACCTTTGGTCGCCCGGCCTCAGTGAGCGAGCGAGCGCGC | |
| | AGAGAGGGAGTGGCCAACTCCATCACTAGGGGTTCCT | |

[0272] In one embodiment, a ceDNA vector for expression of FVIII protein comprises, in the 5′ to 3′ direction: a first adeno-associated virus (AAV) inverted terminal repeat (ITR), a nucleotide sequence of interest (for example an expression cassette as described herein) and a second AAV ITR, where the first ITR (5′ ITR) and the second ITR (3′ ITR) are asymmetric with respect to each other—that is, they have a different 3D-spatial configuration from one another. As an exemplary embodiment, the first ITR can be a wild-type ITR and the second ITR can be a mutated or modified ITR, or vice versa, where the first ITR can be a mutated or modified ITR and the second ITR a wild-type ITR. In some embodiment, the first ITR and the second ITR are both mod-ITRs, but have different sequences, or have different modifications, and thus are not the same modified ITRs, and have different 3D spatial configurations. Stated differently, a ceDNA vector with asymmetric ITRs comprises ITRs where any changes in one ITR relative to the WT-ITR are not reflected in the other ITR; or alternatively, where the asymmetric ITRs have a modified asymmetric ITR pair can have a different sequence and different three-dimensional shape with respect to each other. Exemplary asymmetric ITRs in the ceDNA vector for expression of FVIII protein and for use to generate a ceDNA-plasmid are shown in Table 5A and 5B.

[0273] In an alternative embodiment, a ceDNA vector for expression of FVIII protein comprises two symmetrical mod-ITRs—that is, both ITRs have the same sequence, but are reverse complements (inverted) of each other. In some embodiments, a symmetrical mod-ITR pair comprises at least one or any combination of a deletion, insertion, or substitution relative to wild type ITR sequence from the same AAV serotype. The additions, deletions, or substitutions in the symmetrical ITR are the same but the reverse complement of each other. For example, an insertion of 3 nucleotides in the C region of the 5′ ITR would be reflected in the insertion of 3 reverse complement nucleotides in the corresponding section in the C′ region of the 3′ ITR. Solely for illustration purposes only, if the addition is AACG in the 5′ ITR, the addition is CGTT in the 3′ ITR at the corresponding site. For example, if the 5′ ITR sense strand is ATCGATCG with an addition of AACG between the G and A to result in the sequence ATCGAACGATCG (SEQ ID NO: 51). The corresponding 3′ ITR sense strand is CGATCGAT (the reverse complement of ATCGATCG) with an addition of CGTT (i.e. the reverse complement of AACG) between the T and C to result in the sequence CGATCGTTCGAT (SEQ ID NO: 49) (the reverse complement of ATCGAACGATCG) (SEQ ID NO: 51).

[0274] In alternative embodiments, the modified ITR pair are substantially symmetrical as defined herein—that is, the modified ITR pair can have a different sequence but have corresponding or the same symmetrical three-dimensional shape. For example, one modified ITR can be from one serotype and the other modified ITR be from a different serotype, but they have the same mutation (e.g., nucleotide insertion, deletion or substitution) in the same region. Stated differently, for illustrative purposes only, a 5′ mod-ITR can be from AAV2 and have a deletion in the C region, and the 3′ mod-ITR can be from AAV5 and have the corresponding deletion in the C′ region, and provided the 5′ mod-ITR and the 3′ mod-ITR have the same or symmetrical three-dimensional spatial organization, they are encompassed for use herein as a modified ITR pair.

[0275] In some embodiments, a substantially symmetrical mod-ITR pair has the same A, C-C′ and B-B′ loops in 3D space, e.g., if a modified ITR in a substantially symmetrical mod-ITR pair has a deletion of a C-C′ arm, then the cognate mod-ITR has the corresponding deletion of the C-C′ loop and also has a similar 3D structure of the remaining A and B-B′ loops in the same shape in geometric space of its cognate mod-ITR. By way of example only, substantially symmetrical ITRs can have a symmetrical spatial organization such that their structure is the same shape in geometrical space. This can occur, e.g., when a G-C pair is modified, for example, to a C-G pair or vice versa, or A-T pair is modified to a T-A pair, or vice versa. Therefore, using the exemplary example above of modified 5′ ITR as a ATCGAACGATCG (SEQ ID NO: 51), and modified 3′ ITR as CGATCGTTCGAT (SEQ ID NO: 49) (i.e., the reverse complement of ATCGAACGATCG (SEQ ID NO: 51)), these modified ITRs would still be symmetrical if, for example, the 5′ ITR had the sequence of ATCGAACCATCG (SEQ ID NO: 50), where G in the addition is modified to C, and the substantially symmetrical 3′ ITR has the sequence of CGATCGTTCGAT (SEQ ID NO: 49), without the corresponding modification of the T in the addition to a. In some embodiments, such a modified ITR pair are substantially symmetrical as the modified ITR pair has symmetrical stereochemistry.

[0276] Table 6 shows exemplary symmetric modified ITR pairs (i.e. a left modified ITRs and the symmetric right modified ITR) for use in a ceDNA vector for expression of FVIII protein. The bold (red) portion of the sequences identify partial ITR sequences (i.e., sequences of A-A′, C-C′ and B-B′ loops), also shown in FIGS. 31A-46B. These exemplary modified ITRs can comprise the RBE of GCGCGCTCGCTCGCTC-3′ (SEQ ID NO: 60), spacer of ACTGAGGC (SEQ ID NO: 69), the spacer complement GCCTCAGT (SEQ ID NO: 70) and RBE′ (i.e., complement to RBE) of GAGCGAGCGAGCGCGC (SEQ ID NO: 71).

TABLE 6
Exemplary symmetric modified ITR pairs in a ceDNA vector for expression of
FVIII protein

| LEFT modified ITR | | Symmetric RIGHT modified ITR | |
|---|---|---|---|
| (modified 5′ ITR) | | (modified 3′ ITR) | |
| SEQ ID | CCTGCAGGCAGCTGCGCGCTC | SEQ ID NO: 15 | AGGAACCCCTAGTGATG |
| NO: 32 | GCTCGCTCACTGAGGCCGCC | (ITR-18, right) | GAGTTGGCCACTCCCTCT |
| (ITR-33 | CGGGAAACCCGGGCGTGCGC | | CTGCGCGCTCGCTCGC |
| left) | CTCAGTGAGCGAGCGAGCGC | | TCACTGAGGCGCACGC |
| | GCAGAGAGGGAGTGGCCAACT | | CCGGGTTTCCCGGGCG |
| | CCATCACTAGGGGTTCCT | | GCCTCAGTGAGCGAGC |
| | | | GAGCGCGCAGCTGCCT |
| | | | GCAGG |
| SEQ ID | CCTGCAGGCAGCTGCGCGCTC | SEQ ID NO: 48 | AGGAACCCCTAGTGATG |
| NO: 33 | GCTCGCTCACTGAGGCCGTC | (ITR-51, right) | GAGTTGGCCACTCCCTCT |
| (ITR-34 | GGGCGACCTTTGGTCGCCCG | | CTGCGCGCTCGCTCGC |
| left) | GCCTCAGTGAGCGAGCGAGC | | TCACTGAGGCCGGGCG |
| | GCGCAGAGAGGGAGTGGCCA | | ACCAAAGGTCGCCCGA |
| | ACTCCATCACTAGGGGTTCCT | | CGGCCTCAGTGAGCGA |
| | | | GCGAGCGCGCAGCTGC |
| | | | CTGCAGG |
| SEQ ID | CCTGCAGGCAGCTGCGCGCTC | SEQ ID NO: 16 | AGGAACCCCTAGTGATG |
| NO: 34 | GCTCGCTCACTGAGGCCGCC | (ITR-19, right) | GAGTTGGCCACTCCCTCT |
| (ITR-35 | CGGGCAAAGCCCGGGCGTCG | | CTGCGCGCTCGCTCGC |
| left) | GCCTCAGTGAGCGAGCGAGC | | TCACTGAGGCCGACGC |
| | GCGCAGAGAGGGAGTGGCCA | | CCGGGCTTTGCCCGGG |
| | ACTCCATCACTAGGGGTTCCT | | CGGCCTCAGTGAGCGA |
| | | | GCGAGCGCGCAGCTGC |
| | | | CTGCAGG |
| SEQ ID | CCTGCAGGCAGCTGCGCGCTC | SEQ ID NO: 17 | AGGAACCCCTAGTGATG |
| NO: 35 | GCTCGCTCACTGAGGCGCCC | (ITR-20, right) | GAGTTGGCCACTCCCTCT |
| (ITR-36 | GGGCGTCGGGCGACCTTTGG | | CTGCGCGCTCGCTCGC |
| left) | TCGCCCGGCCTCAGTGAGCG | | TCACTGAGGCCGGGCG |
| | AGCGAGCGCGCAGAGAGGGA | | ACCAAAGGTCGCCCGA |
| | GTGGCCAACTCCATCACTAGG | | CGCCCGGGCGCCTCAG |
| | GGTTCCT | | TGAGCGAGCGAGCGCG |
| | | | CAGCTGCCTGCAGG |
| SEQ ID | CCTGCAGGCAGCTGCGCGCTC | SEQ ID NO: 18 | AGGAACCCCTAGTGATG |
| NO: 36 | GCTCGCTCACTGAGGCAAAG | (ITR-21, right) | GAGTTGGCCACTCCCTCT |
| (ITR-37 | CCTCAGTGAGCGAGCGAGCG | | CTGCGCGCTCGCTCGC |
| left) | CGCAGAGAGGGAGTGGCCAAC | | TCACTGAGGCTTTGCC |
| | TCCATCACTAGGGGTTCCT | | TCAGTGAGCGAGCGAG |
| | | | CGCGCAGCTGCCTGCAG |
| | | | G |
| SEQ ID | CCTGCAGGCAGCTGCGCGCTC | SEQ ID NO: 19 | AGGAACCCCTAGTGATG |
| NO: 37 | GCTCGCTCACTGAGGCCGCC | (ITR-22 right) | GAGTTGGCCACTCCCTCT |
| (ITR-38 | CGGGCAAAGCCCGGGCGTCG | | CTGCGCGCTCGCTCGC |
| left) | GGCGACTTTGTCGCCCGGCC | | TCACTGAGGCCGGGCG |
| | TCAGTGAGCGAGCGAGCGCG | | ACAAAGTCGCCCGACG |
| | CAGAGAGGGAGTGGCCAACTC | | CCCGGGCTTTGCCCGG |
| | CATCACTAGGGGTTCCT | | GCGGCCTCAGTGAGCG |
| | | | AGCGAGCGCGCAGCTG |
| | | | CCTGCAGG |
| SEQ ID | CCTGCAGGCAGCTGCGCGCTC | SEQ ID NO: 20 | AGGAACCCCTAGTGATG |
| NO: 38 | GCTCGCTCACTGAGGCCGCC | (ITR-23, right) | GAGTTGGCCACTCCCTCT |
| (ITR-39 | CGGGCAAAGCCCGGGCGTCG | | CTGCGCGCTCGCTCGC |
| left) | GGCGATTTTCGCCCGGCCTC | | TCACTGAGGCCGGGCG |
| | AGTGAGCGAGCGAGCGCGCA | | AAAATCGCCCGACGCC |
| | GAGAGGGAGTGGCCAACTCCA | | CGGGCTTTGCCCGGGC |
| | TCACTAGGGGTTCCT | | GGCCTCAGTGAGCGAG |
| | | | CGAGCGCGCAGCTGCC |
| | | | TGCAGG |
| SEQ ID | CCTGCAGGCAGCTGCGCGCTC | SEQ ID NO: 21 | AGGAACCCCTAGTGATG |
| NO: 39 | GCTCGCTCACTGAGGCCGCC | (ITR-24, right) | GAGTTGGCCACTCCCTCT |
| (ITR-40 | CGGGCAAAGCCCGGGCGTCG | | CTGCGCGCTCGCTCGC |
| left) | GGCGTTTCGCCCGGCCTCAG | | TCACTGAGGCCGGGCG |
| | TGAGCGAGCGAGCGCGCAGA | | AAACGCCCGACGCCCG |
| | GAGGGAGTGGCCAACTCCATC | | GGCTTTGCCCGGGCGG |
| | ACTAGGGGTTCCT | | CCTCAGTGAGCGAGCG |
| | | | AGCGCGCAGCTGCCTGC |
| | | | AGG |
| SEQ ID | CCTGCAGGCAGCTGCGCGCTC | SEQ ID NO: 22 | AGGAACCCCTAGTGATG |
| NO: 40 | GCTCGCTCACTGAGGCCGCC | (ITR-25 right) | GAGTTGGCCACTCCCTCT |
| (ITR-41 | CGGGCAAAGCCCGGGCGTCG | | CTGCGCGCTCGCTCGC |
| left) | GGCTTTGCCCGGCCTCAGTG | | TCACTGAGGCCGGGCA |
| | AGCGAGCGAGCGCGCAGAGA | | AAGCCCGACGCCCGGG |
| | GGGAGTGGCCAACTCCATCAC | | CTTTGCCCGGGCGGCC |
| | TAGGGGTTCCT | | TCAGTGAGCGAGCGAG |
| | | | CGCGCAGCTGCCTGCAG |
| | | | G |
| SEQ ID | CCTGCAGGCAGCTGCGCGCTC | SEQ ID NO: 23 | AGGAACCCCTAGTGATG |
| NO: 41 | GCTCGCTCACTGAGGCCGCC | (ITR-26 right) | GAGTTGGCCACTCCCTCT |
| (ITR-42 | CGGGAAACCCGGGCGTCGGG | | CTGCGCGCTCGCTCGC |
| left) | CGACCTTTGGTCGCCCGGCC | | TCACTGAGGCCGGGCG |
| | TCAGTGAGCGAGCGAGCGCG | | ACCAAAGGTCGCCCGA |
| | CAGAGAGGGAGTGGCCAACTC | | CGCCCGGGTTTCCCGG |
| | CATCACTAGGGGTTCCT | | GCGGCCTCAGTGAGCG |
| | | | AGCGAGCGCGCAGCTG |
| | | | CCTGCAGG |
| SEQ ID | CCTGCAGGCAGCTGCGCGCTC | SEQ ID NO: 24 | AGGAACCCCTAGTGATG |
| NO: 42 | GCTCGCTCACTGAGGCCGCC | (ITR-27 right) | GAGTTGGCCACTCCCTCT |
| (ITR-43 | CGGAAACCGGGCGTCGGGCG | | CTGCGCGCTCGCTCGC |
| left) | ACCTTTGGTCGCCCGGCCTC | | TCACTGAGGCCGGGCG |
| | AGTGAGCGAGCGAGCGCGCA | | ACCAAAGGTCGCCCGA |
| | GAGAGGGAGTGGCCAACTCCA | | CGCCCGGTTTCCGGGC |
| | TCACTAGGGGTTCCT | | GGCCTCAGTGAGCGAG |
| | | | CGAGCGCGCAGCTGCC |
| | | | TGCAGG |
| SEQ ID | CCTGCAGGCAGCTGCGCGCTC | SEQ ID NO: 25 | AGGAACCCCTAGTGATG |
| NO: 43 | GCTCGCTCACTGAGGCCGCC | (ITR-28 right) | GAGTTGGCCACTCCCTCT |
| (ITR-44 | CGAAACGGGCGTCGGGCGAC | | CTGCGCGCTCGCTCGC |
| | CTTTGGTCGCCCGGCCTCAG | | TCACTGAGGCCGGGCG |
| left) | TGAGCGAGCGAGCGCGCAGA | | ACCAAAGGTCGCCCGA |
| | GAGGGAGTGGCCAACTCCATC | | CGCCCGTTTCGGGCGG |
| | ACTAGGGGTTCCT | | CCTCAGTGAGCGAGCG |
| | | | AGCGCGCAGCTGCCTGC |
| | | | AGG |
| SEQ ID | CCTGCAGGCAGCTGCGCGCTC | SEQ ID NO: 26 | AGGAACCCCTAGTGATG |
| NO: 44 | GCTCGCTCACTGAGGCCGCC | (ITR-29, right) | GAGTTGGCCACTCCCTCT |
| (ITR-45 | CAAAGGGCGTCGGGCGACCT | | CTGCGCGCTCGCTCGC |
| left) | TTGGTCGCCCGGCCTCAGTG | | TCACTGAGGCCGGGCG |
| | AGCGAGCGAGCGCGCAGAGA | | ACCAAAGGTCGCCCGA |
| | GGGAGTGGCCAACTCCATCAC | | CGCCCTTTGGGCGGCC |
| | TAGGGGTTCCT | | TCAGTGAGCGAGCGAG |
| | | | CGCGCAGCTGCCTGCAG |
| | | | G |
| SEQ ID | CCTGCAGGCAGCTGCGCGCTC | SEQ ID NO: | AGGAACCCCTAGTGATG |
| NO: 45 | GCTCGCTCACTGAGGCCGCC | 27(ITR-30, right) | GAGTTGGCCACTCCCTCT |
| (ITR-46 | AAAGGCGTCGGGCGACCTTT | | CTGCGCGCTCGCTCGC |
| left) | GGTCGCCCGGCCTCAGTGAG | | TCACTGAGGCCGGGCG |
| | CGAGCGAGCGCGCAGAGAGG | | ACCAAAGGTCGCCCGA |
| | GAGTGGCCAACTCCATCACTA | | CGCCTTTGGCGGCCTC |
| | GGGGTTCCT | | AGTGAGCGAGCGAGCG |
| | | | CGCAGCTGCCTGCAGG |
| SEQ ID | CCTGCAGGCAGCTGCGCGCTC | SEQ ID NO: 28 | AGGAACCCCTAGTGATG |
| NO: 46 | GCTCGCTCACTGAGGCCGCA | (ITR-31, right) | GAGTTGGCCACTCCCTCT |
| (ITR-47, | AAGCGTCGGGCGACCTTTGG | | CTGCGCGCTCGCTCGC |
| left) | TCGCCCGGCCTCAGTGAGCG | | TCACTGAGGCCGGGCG |
| | AGCGAGCGCGCAGAGAGGGA | | ACCAAAGGTCGCCCGA |
| | GTGGCCAACTCCATCACTAGG | | CGCTTTGCGGCCTCAG |
| | GGTTCCT | | TGAGCGAGCGAGCGCG |
| | | | CAGCTGCCTGCAGG |
| SEQ ID | CCTGCAGGCAGCTGCGCGCTC | SEQ ID NO: 29 | AGGAACCCCTAGTGATG |
| NO: 47 | GCTCGCTCACTGAGGCCGAA | (ITR-32 right) | GAGTTGGCCACTCCCTCT |
| (ITR-48, | ACGTCGGGCGACCTTTGGTC | | CTGCGCGCTCGCTCGC |
| left) | GCCCGGCCTCAGTGAGCGAG | | TCACTGAGGCCGGGCG |
| | CGAGCGCGCAGAGAGGGAGT | | ACCAAAGGTCGCCCGA |
| | GGCCAACTCCATCACTAGGGG | | CGTTTCGGCCTCAGTG |
| | TTCCT | | AGCGAGCGAGCGCGCA |
| | | | GCTGCCTGCAGG |

[0277] In some embodiments, a ceDNA vector for expression of FVIII protein comprising an asymmetric ITR pair can comprise an ITR with a modification corresponding to any of the modifications in ITR sequences or ITR partial sequences shown in any one or more of Tables 5A-5B3 herein, or the sequences shown in FIG. 7A-7B of International Application PCT/US2018/064242, filed Dec. 6, 2018, which is incorporated herein in its entirety, or disclosed in Tables 2, 3, 4, 5, 6, 7, 8, 9 or 10A-10B of International application PCT/US18/49996 filed Sep. 7, 2018 which is incorporated herein in its entirety by reference.

### V. Exemplary ceDNA Vectors

[0278] As described above, the present disclosure relates to recombinant ceDNA expression vectors and ceDNA vectors that encode FVIII protein, comprising any one of: an asymmetrical ITR pair, a symmetrical ITR pair, or substantially symmetrical ITR pair as described above. In certain embodiments, the disclosure relates to recombinant ceDNA vectors for expression of FVIII protein having flanking ITR sequences and a transgene, where the ITR sequences are asymmetrical, symmetrical or substantially symmetrical relative to each other as defined herein, and the ceDNA further comprises a nucleotide sequence of interest (for example an expression cassette comprising the nucleic acid of a transgene) located between the flanking ITRs, wherein said nucleic acid molecule is devoid of viral capsid protein coding sequences.

[0279] The ceDNA expression vector for expression of FVIII protein may be any ceDNA vector that can be conveniently subjected to recombinant DNA procedures including nucleotide sequence(s) as described herein, provided at least one ITR is altered. The ceDNA vectors for expression of FVIII protein of the present disclosure are compatible with the host cell into which the ceDNA vector is to be introduced. In certain embodiments, the ceDNA vectors may be linear. In certain embodiments, the ceDNA vectors may exist as an extrachromosomal entity. In certain embodiments, the ceDNA vectors of the present disclosure may contain an element(s) that permits integration of a donor sequence into the host cell's genome. As used herein “transgene” and “heterologous nucleotide sequence” are synonymous, and encode FVIII protein, as described herein.

[0280] Referring now to FIGS. 1A-1G, schematics of the functional components of two non-limiting plasmids useful in making a ceDNA vector for expression of FVIII protein are shown. FIG. 1A, 1B, 1D, 1F show the construct of ceDNA vectors or the corresponding sequences of ceDNA plasmids for expression of FVIII protein. ceDNA vectors are capsid-free and can be obtained from a plasmid encoding in this order: a first ITR, an expressible transgene cassette and a second ITR, where the first and second ITR sequences are asymmetrical, symmetrical or substantially symmetrical relative to each other as defined herein. ceDNA vectors for expression of FVIII protein are capsid-free and can be obtained from a plasmid encoding in this order: a first ITR, an expressible transgene (protein or nucleic acid) and a second ITR, where the first and second ITR sequences are asymmetrical, symmetrical or substantially symmetrical relative to each other as defined herein. In some embodiments, the expressible transgene cassette includes, as needed: an enhancer/promoter, one or more homology arms, a donor sequence, a post-transcription regulatory element (e.g., WPRE, e.g., SEQ ID NO: 67)), and a polyadenylation and termination signal (e.g., BGH polyA, e.g., SEQ ID NO: 68).

[0281] FIG. 5 is a gel confirming the production of ceDNA from multiple plasmid constructs using the method described in the Examples. The ceDNA is confirmed by a characteristic band pattern in the gel, as discussed with respect to FIG. 4A above and in the Examples.

### A. Regulatory Elements

[0282] The ceDNA vectors for expression of FVIII protein as described herein comprising an asymmetric ITR pair or symmetric ITR pair as defined herein, can further comprise a specific combination of cis-regulatory elements. The cis-regulatory elements include, but are not limited to, a promoter, a riboswitch, an insulator, a mir-regulatable element, a post-transcriptional regulatory element, a tissue- and cell type-specific promoter and an enhancer. In some embodiments, the ITR can act as the promoter for the transgene, e.g., FVIII protein. In some embodiments, the ceDNA vector for expression of FVIII protein as described herein comprises additional components to regulate expression of the transgene, for example, regulatory switches as described herein, to regulate the expression of the transgene, or a kill switch, which can kill a cell comprising the ceDNA vector encoding FVIII protein thereof. Regulatory elements, including Regulatory Switches that can be used in the present invention are more fully discussed in International application PCT/US18/49996, which is incorporated herein in its entirety by reference.

[0283] In embodiments, the second nucleotide sequence includes a regulatory sequence, and a nucleotide sequence encoding a nuclease. In certain embodiments the gene regulatory sequence is operably linked to the nucleotide sequence encoding the nuclease. In certain embodiments, the regulatory sequence is suitable for controlling the expression of the nuclease in a host cell. In certain embodiments, the regulatory sequence includes a suitable promoter sequence, being able to direct transcription of a gene operably linked to the promoter sequence, such as a nucleotide sequence encoding the nuclease(s) of the present disclosure. In certain embodiments, the second nucleotide sequence includes an intron sequence linked to the 5′ terminus of the nucleotide sequence encoding the nuclease. In certain embodiments, an enhancer sequence is provided upstream of the promoter to increase the efficacy of the promoter. In certain embodiments, the regulatory sequence includes an enhancer and a promoter, wherein the second nucleotide sequence includes an intron sequence upstream of the nucleotide sequence encoding a nuclease, wherein the intron includes one or more nuclease cleavage site(s), and wherein the promoter is operably linked to the nucleotide sequence encoding the nuclease.

[0284] The ceDNA vectors for expression of FVIII protein produced synthetically, or using a cell-based production method as described herein in the Examples, can further comprise a specific combination of cis-regulatory elements such as WHP posttranscriptional regulatory element (WPRE) (e.g., SEQ ID NO: 67) and BGH polyA (SEQ ID NO: 68). Suitable expression cassettes for use in expression constructs are not limited by the packaging constraint imposed by the viral capsid.

### (i) Promoters:

[0285] It will be appreciated by one of ordinary skill in the art that promoters used in the ceDNA vectors for expression of FVIII protein as disclosed herein should be tailored as appropriate for the specific sequences they are promoting. According to some embodiments, the promoter is any promoter or promoter sequence set forth in International Application No. PCT/US2020/021328, filed on Mar. 6, 2020, incorporated by reference in its entirety herein.

[0286] According to some embodiments, the promoter is VandenDriessche (VD) promoter. According to some embodiments, the VD promoter comprises SEQ ID NO: 191 shown below:

(SEQ ID NO: 191)
CGGGGGAGGCTGCTGGTGAATATTAACCAAGGTCACCCCAGTTATCGGAGG
AGCAAACAGGGGCTAAGTCCACACGCGTGGTACCGTCTGTCTGCACATTTC
GTAGAGCGAGTGTTCCGATACTCTAATCTCCCTAGGCAAGGTTCATATTTG
TGTAGGTTACTTATTCTCCTTTTGTTGACTAAGTCAATAATCAGAATCAGC
AGGTTTGGAGTCAGCTTGGCAGGGATCAGCAGCCTGGGTTGGAAGGAGGGG
GTATAAAAGCCCCTTCACCAGGAGAAGCCGTCACACAGATCCACAAGCTCC
TGAAGAGGTAAGGGTTTAAGGGATGGTTGGTTGGTGGGGTATTAATGTTTA
ATTACCTGGAGCACCTGCCTGAAATCACTTTTTTTCAGGTTG.

[0287] According to some embodiments, the promoter comprises a nucleic acid sequence at least about 85% identical to SEQ ID NO: 191. According to some embodiments, the promoter comprises a nucleic acid sequence at least about 90% identical to SEQ ID NO: 191. According to some embodiments, the promoter comprises a nucleic acid sequence at least about 95% identical to SEQ ID NO: 191. According to some embodiments, the promoter comprises a nucleic acid sequence at least about 96% identical to SEQ ID NO: 191. According to some embodiments, the promoter comprises a nucleic acid sequence at least about 97% identical to SEQ ID NO: 191. According to some embodiments, the promoter comprises a nucleic acid sequence at least about 98% identical to SEQ ID NO: 191. According to some embodiments, the promoter comprises a nucleic acid sequence at least about 99% identical to SEQ ID NO: 191. According to some embodiments, the promoter consists of the nucleic acid sequence of SEQ ID NO: 191.

[0288] Expression cassettes of the ceDNA vector for expression of FVIII protein can include a promoter, which can influence overall expression levels as well as cell-specificity. For transgene expression, e.g., expression of FVIII protein, they can include a highly active virus-derived immediate early promoter. Expression cassettes can contain tissue-specific eukaryotic promoters to limit transgene expression to specific cell types and reduce toxic effects and immune responses resulting from unregulated, ectopic expression. In some embodiments, an expression cassette can contain a promoter or synthetic regulatory element, such as a CAG promoter (SEQ ID NO: 72). The CAG promoter comprises (i) the cytomegalovirus (CMV) early enhancer element, (ii) the promoter, the first exon and the first intron of chicken beta-actin gene, and (iii) the splice acceptor of the rabbit beta-globin gene. Alternatively, an expression cassette can contain an Alpha-1-antitrypsin (AAT) promoter (SEQ ID NO: 73 or SEQ ID NO: 74), a liver specific (LP1) promoter (SEQ ID NO: 75 or SEQ ID NO: 76), or a Human elongation factor-1 alpha (EF1a) promoter (e.g., SEQ ID NO: 77 or SEQ ID NO: 78). In some embodiments, the expression cassette includes one or more constitutive promoters, for example, a retroviral Rous sarcoma virus (RSV) LTR promoter (optionally with the RSV enhancer), or a cytomegalovirus (CMV) immediate early promoter (optionally with the CMV enhancer, e.g., SEQ ID NO: 79). Alternatively, an inducible promoter, a native promoter for a transgene, a tissue-specific promoter, or various promoters known in the art can be used.

[0289] Suitable promoters, including those described herein, can be derived from viruses and can therefore be referred to as viral promoters, or they can be derived from any organism, including prokaryotic or eukaryotic organisms. Suitable promoters can be used to drive expression by any RNA polymerase (e.g., pol I, pol II, pol III). Exemplary promoters include, but are not limited to the SV40 early promoter, mouse mammary tumor virus long terminal repeat (LTR) promoter; adenovirus major late promoter (Ad MLP); a herpes simplex virus (HSV) promoter, a cytomegalovirus (CMV) promoter such as the CMV immediate early promoter region (CMVIE), a rous sarcoma virus (RSV) promoter, a human U6 small nuclear promoter (U6, e.g., SEQ ID NO: 80) (Miyagishi et al., Nature Biotechnology 20, 497-500 (2002)), an enhanced U6 promoter (e.g., Xia et al., Nucleic Acids Res. 2003 Sep. 1; 31(17)), a human H1 promoter (H1) (e.g., SEQ ID NO: 81 or SEQ ID NO: 155), a CAG promoter, a human alpha 1-antitypsin (HAAT) promoter (e.g., SEQ ID NO: 82), and the like. In certain embodiments, these promoters are altered at their downstream intron containing end to include one or more nuclease cleavage sites. In certain embodiments, the DNA containing the nuclease cleavage site(s) is foreign to the promoter DNA.

[0290] In one embodiment, the promoter used is the native promoter of the gene encoding the therapeutic protein. The promoters and other regulatory sequences for the respective genes encoding the therapeutic proteins are known and have been characterized. The promoter region used may further include one or more additional regulatory sequences (e.g., native), e.g., enhancers, (e.g. SEQ ID NO: 79 and SEQ ID NO: 83), including a SV40 enhancer (SEQ ID NO: 126).

[0291] In some embodiments, a promoter may also be a promoter from a human gene such as human ubiquitin C (hUbC), human actin, human myosin, human hemoglobin, human muscle creatine, or human metallothionein. The promoter may also be a tissue specific promoter, such as a liver specific promoter, such as human alpha 1-antitypsin (HAAT), natural or synthetic. In one embodiment, delivery to the liver can be achieved using endogenous ApoE specific targeting of the composition comprising a ceDNA vector to hepatocytes via the low-density lipoprotein (LDL) receptor present on the surface of the hepatocyte.

[0292] Non-limiting examples of suitable promoters for use in accordance with the present invention include any of the promoters described herein, or any of the following: the CAG promoter of, for example (SEQ ID NO: 72), the HAAT promoter (SEQ ID NO: 82), the human EF1-α promoter (SEQ ID NO: 77) or a fragment of the EF1a promoter (SEQ ID NO: 78), IE2 promoter (e.g., SEQ ID NO: 84) and the rat EF1-α promoter (SEQ ID NO: 85), mEF1 promoter (SEQ ID NO: 59), or 1E1 promoter fragment (SEQ ID NO: 125).

### (ii) Enhancers

[0293] In some embodiments, a ceDNA expressing FVIII comprises one or more enhancers. In some embodiments, an enhancer sequence is located 5′ of the promoter sequence. In some embodiments, the enhancer sequence is located 3′ of the promoter sequence. According to some embodiments, the enhancer is any enhancer or enhancer sequence set forth in International Application No. PCT/US2020/021328, filed on Mar. 6, 2020, incorporated by reference in its entirety herein.

(iii) 5′ UTR Sequences and Intron Sequences

[0294] In some embodiments, a ceDNA vector comprises a 5′ UTR sequence and/or an intron sequence that located 3′ of the 5′ ITR sequence. In some embodiments, the 5′ UTR is located 5′ of the transgene, e.g., sequence encoding the FVIII protein. Exemplary 5′ UTR sequences listed in International Application No. PCT/US2020/021328, for example in Table 9A, incorporated by reference in its entirety herein.

### (iv) 3′ UTR Sequences

[0295] In some embodiments, a ceDNA vector comprises a 3′ UTR sequence that located 5′ of the 3′ ITR sequence. In some embodiments, the 3′ UTR is located 3′ of the transgene, e.g., sequence encoding the FVIII protein. Exemplary 3′ UTR sequences listed in International Application No. PCT/US2020/021328, for example in Table 9B, incorporated by reference in its entirety herein. (v)

### Polyadenylation Sequences:

[0296] A sequence encoding a polyadenylation sequence can be included in the ceDNA vector for expression of FVIII protein to stabilize an mRNA expressed from the ceDNA vector, and to aid in nuclear export and translation. In one embodiment, the ceDNA vector does not include a polyadenylation sequence. In other embodiments, the ceDNA vector for expression of FVIII protein includes at least 1, at least 2, at least 3, at least 4, at least 5, at least 10, at least 15, at least 20, at least 25, at least 30, at least 40, least 45, at least 50 or more adenine dinucleotides. In some embodiments, the polyadenylation sequence comprises about 43 nucleotides, about 40-50 nucleotides, about 40-55 nucleotides, about 45-50 nucleotides, about 35-50 nucleotides, or any range there between.

[0297] The expression cassettes can include any poly-adenylation sequence known in the art or a variation thereof. In some embodiments, a poly-adenylation (polyA) sequence is selected from any of those listed in International Application No. PCT/US2020/021328, for example in Table 10, incorporated by reference in its entirety herein. Other polyA sequences commonly known in the art can also be used, e.g., including but not limited to, naturally occurring sequence isolated from bovine BGHpA (e.g., SEQ ID NO: 68) or a virus SV40pA (e.g., SEQ ID NO: 86), or a synthetic sequence (e.g., SEQ ID NO: 87). Some expression cassettes can also include SV40 late polyA signal upstream enhancer (USE) sequence. In some embodiments, a USE sequence can be used in combination with SV40pA or heterologous poly-A signal. PolyA sequences are located 3′ of the transgene encoding the FVIII protein.

[0298] The expression cassettes can also include a post-transcriptional element to increase the expression of a transgene. In some embodiments, Woodchuck Hepatitis Virus (WHP) posttranscriptional regulatory element (WPRE) (e.g., SEQ ID NO: 67) is used to increase the expression of a transgene. Other posttranscriptional processing elements such as the post-transcriptional element from the thymidine kinase gene of herpes simplex virus, or hepatitis B virus (HBV) can be used. Secretory sequences can be linked to the transgenes, e.g., VH-02 and VK-A26 sequences, e.g., SEQ ID NO: 88 and SEQ ID NO: 89.

### (vi) Nuclear Localization Sequences

[0299] In some embodiments, the ceDNA vector for expression of FVIII protein comprises one or more nuclear localization sequences (NLSs), for example, 1, 2, 3, 4, 5, 6, 7, 8, 9, 10, or more NLSs. In some embodiments, the one or more NLSs are located at or near the amino-terminus, at or near the carboxy-terminus, or a combination of these (e.g., one or more NLS at the amino-terminus and/or one or more NLS at the carboxy terminus). When more than one NLS is present, each can be selected independently of the others, such that a single NLS is present in more than one copy and/or in combination with one or more other NLSs present in one or more copies. Non-limiting examples of NLSs are shown in Table 7.

TABLE 7
Nuclear Localization Signals

| | | SEQ ID |
|---|---|---|
| SOURCE | SEQUENCE | NO. |
| SV40 virus large | PKKKRKV (encoded by CCCAAGAAGAAGAGGAAGGTG; | 90 |
| T-antigen | SEQ ID NO: 91) | |
| nucleoplasmin | KRPAATKKAGQAKKKK | 92 |
| c-myc | PAAKRVKLD | 93 |
| | RQRRNELKRSP | 94 |
| hRNPA1 M9 | NQSSNFGPMKGGNFGGRSSGPYGGGGQYFAKPRNQGGY | 95 |
| IBB domain from | RMRIZFKNKGKDTAELRRRRVEVSVELRKAKKDEQILKRRNV | 96 |
| importin-alpha | | |
| myoma T protein | VSRKRPRP | 97 |
| | PPKKARED | 98 |
| human p53 | PQPKKKPL | 99 |
| mouse c-abl IV | SALIKKKKKMAP | 100 |
| influenza virus | DRLRR | 117 |
| NS1 | PKQKKRK | 118 |
| Hepatitis virus | RKLKKKIKKL | 119 |
| delta antigen | | |
| mouse Mx1 protein | REKKKFLKRR | 120 |
| human poly (ADP- | KRKGDEVDGVDEVAKKKSKK | 121 |
| ribose) polymerase | | |
| steroid hormone | RKCLQAGMNLEARKTKK | 122 |
| receptors (human) | | |
| glucocorticoid | | |

B. Additional Components of ceDNA Vectors

[0300] The ceDNA vectors for expression of FVIII protein of the present disclosure may contain nucleotides that encode other components for gene expression. For example, to select for specific gene targeting events, a protective shRNA may be embedded in a microRNA and inserted into a recombinant ceDNA vector designed to integrate site-specifically into the highly active locus, such as an albumin locus. Such embodiments may provide a system for in vivo selection and expansion of gene-modified hepatocytes in any genetic background such as described in Nygaard et al., A universal system to select gene-modified hepatocytes in vivo, Gene Therapy, Jun. 8, 2016. The ceDNA vectors of the present disclosure may contain one or more selectable markers that permit selection of transformed, transfected, transduced, or the like cells. A selectable marker is a gene the product of which provides for biocide or viral resistance, resistance to heavy metals, prototrophy to auxotrophs, NeoR, and the like. In certain embodiments, positive selection markers are incorporated into the donor sequences such as NeoR. Negative selections markers may be incorporated downstream the donor sequences, for example a nucleic acid sequence HSV-tk encoding a negative selection marker may be incorporated into a nucleic acid construct downstream the donor sequence.

### C. Regulatory Switches

[0301] A molecular regulatory switch is one which generates a measurable change in state in response to a signal. Such regulatory switches can be usefully combined with the ceDNA vectors for expression of FVIII protein as described herein to control the output of expression of FVIII protein from the ceDNA vector. In some embodiments, the ceDNA vector for expression of FVIII protein comprises a regulatory switch that serves to fine tune expression of the FVIII protein. For example, it can serve as a biocontainment function of the ceDNA vector. In some embodiments, the switch is an “ON/OFF” switch that is designed to start or stop (i.e., shut down) expression of FVIII protein in the ceDNA vector in a controllable and regulatable fashion. In some embodiments, the switch can include a “kill switch” that can instruct the cell comprising the ceDNA vector to undergo cell programmed death once the switch is activated. Exemplary regulatory switches encompassed for use in a ceDNA vector for expression of FVIII protein can be used to regulate the expression of a transgene, and are more fully discussed in International application PCT/US18/49996, which is incorporated herein in its entirety by reference

### (i) Binary Regulatory Switches

[0302] In some embodiments, the ceDNA vector for expression of FVIII protein comprises a regulatory switch that can serve to controllably modulate expression of FVIII protein. For example, the expression cassette located between the ITRs of the ceDNA vector may additionally comprise a regulatory region, e.g., a promoter, cis-element, repressor, enhancer etc., that is operatively linked to the nucleic acid sequence encoding FVIII protein, where the regulatory region is regulated by one or more cofactors or exogenous agents. By way of example only, regulatory regions can be modulated by small molecule switches or inducible or repressible promoters. Non-limiting examples of inducible promoters are hormone-inducible or metal-inducible promoters. Other exemplary inducible promoters/enhancer elements include, but are not limited to, an RU486-inducible promoter, an ecdysone-inducible promoter, a rapamycin-inducible promoter, and a metallothionein promoter.

### (ii) Small Molecule Regulatory Switches

[0303] A variety of art-known small-molecule based regulatory switches are known in the art and can be combined with the ceDNA vectors for expression of FVIII protein as disclosed herein to form a regulatory-switch controlled ceDNA vector. In some embodiments, the regulatory switch can be selected from any one or a combination of: an orthogonal ligand/nuclear receptor pair, for example retinoid receptor variant/LG335 and GRQCIMFI, along with an artificial promoter controlling expression of the operatively linked transgene, such as that as disclosed in Taylor, et al. BMC Biotechnology 10 (2010): 15; engineered steroid receptors, e.g., modified progesterone receptor with a C-terminal truncation that cannot bind progesterone but binds RU486 (mifepristone) (U.S. Pat. No. 5,364,791); an ecdysone receptor from Drosophila and their ecdysteroid ligands (Saez, et al., PNAS, 97(26)(2000), 14512-14517; or a switch controlled by the antibiotic trimethoprim (TMP), as disclosed in Sando R 3^{rd}; Nat Methods. 2013, 10(11):1085-8. In some embodiments, the regulatory switch to control the transgene or expressed by the ceDNA vector is a pro-drug activation switch, such as that disclosed in U.S. Pat. Nos. 8,771,679, and 6,339,070.

(iii) “Passcode” Regulatory Switches

[0304] In some embodiments the regulatory switch can be a “passcode switch” or “passcode circuit”. Passcode switches allow fine tuning of the control of the expression of the transgene from the ceDNA vector when specific conditions occur—that is, a combination of conditions need to be present for transgene expression and/or repression to occur. For example, for expression of a transgene to occur at least conditions A and B must occur. A passcode regulatory switch can be any number of conditions, e.g., at least 2, or at least 3, or at least 4, or at least 5, or at least 6 or at least 7 or more conditions to be present for transgene expression to occur. In some embodiments, at least 2 conditions (e.g., A, B conditions) need to occur, and in some embodiments, at least 3 conditions need to occur (e.g., A, B and C, or A, B and D). By way of an example only, for gene expression from a ceDNA to occur that has a passcode “ABC” regulatory switch, conditions A, B and C must be present. Conditions A, B and C could be as follows; condition A is the presence of a condition or disease, condition B is a hormonal response, and condition C is a response to the transgene expression. For example, if the transgene edits a defective EPO gene, Condition A is the presence of Chronic Kidney Disease (CKD), Condition B occurs if the subject has hypoxic conditions in the kidney, Condition C is that Erythropoietin-producing cells (EPC) recruitment in the kidney is impaired; or alternatively, HIF-2 activation is impaired. Once the oxygen levels increase or the desired level of EPO is reached, the transgene turns off again until 3 conditions occur, turning it back on.

[0305] In some embodiments, a passcode regulatory switch or “Passcode circuit” encompassed for use in the ceDNA vector comprises hybrid transcription factors (TFs) to expand the range and complexity of environmental signals used to define biocontainment conditions. As opposed to a deadman switch which triggers cell death in the presence of a predetermined condition, the “passcode circuit” allows cell survival or transgene expression in the presence of a particular “passcode”, and can be easily reprogrammed to allow transgene expression and/or cell survival only when the predetermined environmental condition or passcode is present.

[0306] Any and all combinations of regulatory switches disclosed herein, e.g., small molecule switches, nucleic acid-based switches, small molecule-nucleic acid hybrid switches, post-transcriptional transgene regulation switches, post-translational regulation, radiation-controlled switches, hypoxia-mediated switches and other regulatory switches known by persons of ordinary skill in the art as disclosed herein can be used in a passcode regulatory switch as disclosed herein. Regulatory switches encompassed for use are also discussed in the review article Kis et al., J R Soc Interface. 12: 20141000 (2015), and summarized in Table 1 of Kis. In some embodiments, a regulatory switch for use in a passcode system can be selected from any or a combination of the switches disclosed in Table 11 of International Patent Application PCT/US18/49996, which is incorporated herein in its entirety by reference.

### (iv) Nucleic Acid-Based Regulatory Switches to Control Transgene Expression

[0307] In some embodiments, the regulatory switch to control the expression of FVIII protein by the ceDNA is based on a nucleic acid based control mechanism. Exemplary nucleic acid control mechanisms are known in the art and are envisioned for use. For example, such mechanisms include riboswitches, such as those disclosed in, e.g., US2009/0305253, US2008/0269258, US2017/0204477, WO2018026762A1, U.S. Pat. No. 9,222,093 and EP application EP288071, and disclosed in the review by Villa J K et al., Microbiol Spectr. 2018 May; 6(3). Also included are metabolite-responsive transcription biosensors, such as those disclosed in WO2018/075486 and WO2017/147585. Other art-known mechanisms envisioned for use include silencing of the transgene with an siRNA or RNAi molecule (e.g., miR, shRNA). For example, the ceDNA vector can comprise a regulatory switch that encodes a RNAi molecule that is complementary to the two part of the transgene expressed by the ceDNA vector. When such RNAi is expressed even if the transgene (e.g., FVIII protein) is expressed by the ceDNA vector, it will be silenced by the complementary RNAi molecule, and when the RNAi is not expressed when the transgene is expressed by the ceDNA vector the transgene (e.g., FVIII protein) is not silenced by the RNAi.

[0308] In some embodiments, the regulatory switch is a tissue-specific self-inactivating regulatory switch, for example as disclosed in US2002/0022018, whereby the regulatory switch deliberately switches transgene (e.g., FVIII protein) off at a site where transgene expression might otherwise be disadvantageous. In some embodiments, the regulatory switch is a recombinase reversible gene expression system, for example as disclosed in US2014/0127162 and U.S. Pat. No. 8,324,436.

### (v) Post-Transcriptional and Post-Translational Regulatory Switches.

[0309] In some embodiments, the regulatory switch to control the expression of FVIII protein by the ceDNA vector is a post-transcriptional modification system. For example, such a regulatory switch can be an aptazyme riboswitch that is sensitive to tetracycline or theophylline, as disclosed in US2018/0119156, GB201107768, WO2001/064956A3, EP Patent 2707487 and Beilstein et al., ACS Synth. Biol., 2015, 4 (5), pp 526-534; Zhong et al., Elife. 2016 Nov. 2; 5. pii: e18858. In some embodiments, it is envisioned that a person of ordinary skill in the art could encode both the transgene and an inhibitory siRNA which contains a ligand sensitive (OFF-switch) aptamer, the net result being a ligand sensitive ON-switch.

### (vi) Other Exemplary Regulatory Switches

[0310] Any known regulatory switch can be used in the ceDNA vector to control the expression of FVIII protein by the ceDNA vector, including those triggered by environmental changes. Additional examples include, but are not limited to; the BOC method of Suzuki et al., Scientific Reports 8; 10051 (2018); genetic code expansion and a non-physiologic amino acid; radiation-controlled or ultra-sound controlled on/off switches (see, e.g., Scott S et al., Gene Ther. 2000 July; 7(13):1121-5; U.S. Pat. Nos. 5,612,318; 5,571,797; 5,770,581; 5,817,636; and WO1999/025385A1. In some embodiments, the regulatory switch is controlled by an implantable system, e.g., as disclosed in U.S. Pat. No. 7,840,263; US2007/0190028A1 where gene expression is controlled by one or more forms of energy, including electromagnetic energy, that activates promoters operatively linked to the transgene in the ceDNA vector.

[0311] In some embodiments, a regulatory switch envisioned for use in the ceDNA vector is a hypoxia-mediated or stress-activated switch, e.g., such as those disclosed in WO1999060142A2, U.S. Pat. Nos. 5,834,306; 6,218,179; 6,709,858; US2015/0322410; Greco et al., (2004) Targeted Cancer Therapies 9, S368, as well as FROG, TOAD and NRSE elements and conditionally inducible silence elements, including hypoxia response elements (HREs), inflammatory response elements (IREs) and shear-stress activated elements (SSAEs), e.g., as disclosed in U.S. Pat. No. 9,394,526. Such an embodiment is useful for turning on expression of the transgene from the ceDNA vector after ischemia or in ischemic tissues, and/or tumors.

(vii) Kill Switches

[0312] Other embodiments described herein relate to a ceDNA vector for expression of FVIII protein as described herein comprising a kill switch. A kill switch as disclosed herein enables a cell comprising the ceDNA vector to be killed or undergo programmed cell death as a means to permanently remove an introduced ceDNA vector from the subject's system. It will be appreciated by one of ordinary skill in the art that use of kill switches in the ceDNA vectors for expression of FVIII protein would be typically coupled with targeting of the ceDNA vector to a limited number of cells that the subject can acceptably lose or to a cell type where apoptosis is desirable (e.g., cancer cells). In all aspects, a “kill switch” as disclosed herein is designed to provide rapid and robust cell killing of the cell comprising the ceDNA vector in the absence of an input survival signal or other specified condition. Stated another way, a kill switch encoded by a ceDNA vector for expression of FVIII protein as described herein can restrict cell survival of a cell comprising a ceDNA vector to an environment defined by specific input signals. Such kill switches serve as a biological biocontainment function should it be desirable to remove the ceDNA vector e expression of FVIII protein in a subject or to ensure that it will not express the encoded FVIII protein.

[0313] Other kill switches known to a person of ordinary skill in the art are encompassed for use in the ceDNA vector for expression of FVIII protein as disclosed herein, e.g., as disclosed in US2010/0175141; US2013/0009799; US2011/0172826; US2013/0109568, as well as kill switches disclosed in Jusiak et al., Reviews in Cell Biology and molecular Medicine; 2014; 1-56; Kobayashi et al., PNAS, 2004; 101; 8419-9; Marchisio et al., Int. Journal of Biochem and Cell Biol., 2011; 43; 310-319; and in Reinshagen et al., Science Translational Medicine, 2018, 11.

[0314] Accordingly, in some embodiments, the ceDNA vector for expression of FVIII protein can comprise a kill switch nucleic acid construct, which comprises the nucleic acid encoding an effector toxin or reporter protein, where the expression of the effector toxin (e.g., a death protein) or reporter protein is controlled by a predetermined condition. For example, a predetermined condition can be the presence of an environmental agent, such as, e.g., an exogenous agent, without which the cell will default to expression of the effector toxin (e.g., a death protein) and be killed. In alternative embodiments, a predetermined condition is the presence of two or more environmental agents, e.g., the cell will only survive when two or more necessary exogenous agents are supplied, and without either of which, the cell comprising the ceDNA vector is killed.

[0315] In some embodiments, the ceDNA vector for expression of FVIII protein is modified to incorporate a kill-switch to destroy the cells comprising the ceDNA vector to effectively terminate the in vivo expression of the transgene being expressed by the ceDNA vector (e.g., expression of FVIII protein). Specifically, the ceDNA vector is further genetically engineered to express a switch-protein that is not functional in mammalian cells under normal physiological conditions. Only upon administration of a drug or environmental condition that specifically targets this switch-protein, the cells expressing the switch-protein will be destroyed thereby terminating the expression of the therapeutic protein or peptide. For instance, it was reported that cells expressing HSV-thymidine kinase can be killed upon administration of drugs, such as ganciclovir and cytosine deaminase. See, for example, Dey and Evans, Suicide Gene Therapy by Herpes Simplex Virus-1 Thymidine Kinase (HSV-TK), in Targets in Gene Therapy, edited by You (2011); and Beltinger et al., Proc. Natl. Acad. Sci. USA 96(15):8699-8704 (1999). In some embodiments the ceDNA vector can comprise a siRNA kill switch referred to as DISE (Death Induced by Survival gene Elimination) (Murmann et al., Oncotarget. 2017; 8:84643-84658. Induction of DISE in ovarian cancer cells in vivo).

### VI. Detailed Method of Production of a ceDNA Vector

### A. Production in General

[0316] Certain methods for the production of a ceDNA vector for expression of FVIII protein comprising an asymmetrical ITR pair or symmetrical ITR pair as defined herein is described in section IV of International application PCT/US18/49996 filed Sep. 7, 2018, which is incorporated herein in its entirety by reference. In some embodiments, a ceDNA vector for expression of FVIII protein as disclosed herein can be produced using insect cells, as described herein. In alternative embodiments, a ceDNA vector for expression of FVIII protein as disclosed herein can be produced synthetically and in some embodiments, in a cell-free method, as disclosed on International Application PCT/US19/14122, filed Jan. 18, 2019, which is incorporated herein in its entirety by reference.

[0317] As described herein, in one embodiment, a ceDNA vector for expression of FVIII protein can be obtained, for example, by the process comprising the steps of: a) incubating a population of host cells (e.g. insect cells) harboring the polynucleotide expression construct template (e.g., a ceDNA-plasmid, a ceDNA-Bacmid, and/or a ceDNA-baculovirus), which is devoid of viral capsid coding sequences, in the presence of a Rep protein under conditions effective and for a time sufficient to induce production of the ceDNA vector within the host cells, and wherein the host cells do not comprise viral capsid coding sequences; and b) harvesting and isolating the ceDNA vector from the host cells. The presence of Rep protein induces replication of the vector polynucleotide with a modified ITR to produce the ceDNA vector in a host cell. However, no viral particles (e.g. AAV virions) are expressed. Thus, there is no size limitation such as that naturally imposed in AAV or other viral-based vectors.

[0318] The presence of the ceDNA vector isolated from the host cells can be confirmed by digesting DNA isolated from the host cell with a restriction enzyme having a single recognition site on the ceDNA vector and analyzing the digested DNA material on a non-denaturing gel to confirm the presence of characteristic bands of linear and continuous DNA as compared to linear and non-continuous DNA.

[0319] In yet another aspect, the invention provides for use of host cell lines that have stably integrated the DNA vector polynucleotide expression template (ceDNA template) into their own genome in production of the non-viral DNA vector, e.g. as described in Lee, L. et al. (2013) Plos One 8(8): e69879. Preferably, Rep is added to host cells at an MOI of about 3. When the host cell line is a mammalian cell line, e.g., HEK293 cells, the cell lines can have polynucleotide vector template stably integrated, and a second vector such as herpes virus can be used to introduce Rep protein into cells, allowing for the excision and amplification of ceDNA in the presence of Rep and helper virus.

[0320] In one embodiment, the host cells used to make the ceDNA vectors for expression of FVIII protein as described herein are insect cells, and baculovirus is used to deliver both the polynucleotide that encodes Rep protein and the non-viral DNA vector polynucleotide expression construct template for ceDNA, e.g., as described in FIGS. 4A-4C and Example 1. In some embodiments, the host cell is engineered to express Rep protein.

[0321] The ceDNA vector is then harvested and isolated from the host cells. The time for harvesting and collecting ceDNA vectors described herein from the cells can be selected and optimized to achieve a high-yield production of the ceDNA vectors. For example, the harvest time can be selected in view of cell viability, cell morphology, cell growth, etc. In one embodiment, cells are grown under sufficient conditions and harvested a sufficient time after baculoviral infection to produce ceDNA vectors but before a majority of cells start to die because of the baculoviral toxicity. The DNA vectors can be isolated using plasmid purification kits such as Qiagen Endo-Free Plasmid kits. Other methods developed for plasmid isolation can be also adapted for DNA vectors. Generally, any nucleic acid purification methods can be adopted.

[0322] The DNA vectors can be purified by any means known to those of skill in the art for purification of DNA. In one embodiment, ceDNA vectors are purified as DNA molecules. In another embodiment, the ceDNA vectors are purified as exosomes or microparticles.

[0323] The presence of the ceDNA vector for expression of FVIII protein can be confirmed by digesting the vector DNA isolated from the cells with a restriction enzyme having a single recognition site on the DNA vector and analyzing both digested and undigested DNA material using gel electrophoresis to confirm the presence of characteristic bands of linear and continuous DNA as compared to linear and non-continuous DNA. FIG. 4C and FIG. 4D illustrate one embodiment for identifying the presence of the closed ended ceDNA vectors produced by the processes herein.

B. ceDNA Plasmid

[0324] A ceDNA-plasmid is a plasmid used for later production of a ceDNA vector for expression of FVIII protein. In some embodiments, a ceDNA-plasmid can be constructed using known techniques to provide at least the following as operatively linked components in the direction of transcription: (1) a modified 5′ ITR sequence; (2) an expression cassette containing a cis-regulatory element, for example, a promoter, inducible promoter, regulatory switch, enhancers and the like; and (3) a modified 3′ ITR sequence, where the 3′ ITR sequence is symmetric relative to the 5′ ITR sequence. In some embodiments, the expression cassette flanked by the ITRs comprises a cloning site for introducing an exogenous sequence. The expression cassette replaces the rep and cap coding regions of the AAV genomes.

[0325] In one aspect, a ceDNA vector for expression of FVIII protein is obtained from a plasmid, referred to herein as a “ceDNA-plasmid” encoding in this order: a first adeno-associated virus (AAV) inverted terminal repeat (ITR), an expression cassette comprising a transgene, and a mutated or modified AAV ITR, wherein said ceDNA-plasmid is devoid of AAV capsid protein coding sequences. In alternative embodiments, the ceDNA-plasmid encodes in this order: a first (or 5′) modified or mutated AAV ITR, an expression cassette comprising a transgene, and a second (or 3′) modified AAV ITR, wherein said ceDNA-plasmid is devoid of AAV capsid protein coding sequences, and wherein the 5′ and 3′ ITRs are symmetric relative to each other. In alternative embodiments, the ceDNA-plasmid encodes in this order: a first (or 5′) modified or mutated AAV ITR, an expression cassette comprising a transgene, and a second (or 3′) mutated or modified AAV ITR, wherein said ceDNA-plasmid is devoid of AAV capsid protein coding sequences, and wherein the 5′ and 3′ modified ITRs are have the same modifications (i.e., they are inverse complement or symmetric relative to each other).

[0326] In a further embodiment, the ceDNA-plasmid system is devoid of viral capsid protein coding sequences (i.e. it is devoid of AAV capsid genes but also of capsid genes of other viruses). In addition, in a particular embodiment, the ceDNA-plasmid is also devoid of AAV Rep protein coding sequences. Accordingly, in a preferred embodiment, ceDNA-plasmid is devoid of functional AAV cap and AAV rep genes GG-3′ for AAV2) plus a variable palindromic sequence allowing for hairpin formation.

[0327] A ceDNA-plasmid of the present invention can be generated using natural nucleotide sequences of the genomes of any AAV serotypes well known in the art. In one embodiment, the ceDNA-plasmid backbone is derived from the AAV1, AAV2, AAV3, AAV4, AAV5, AAV 5, AAV7, AAV8, AAV9, AAV10, AAV 11, AAV12, AAVrh8, AAVrh10, AAV-DJ, and AAV-DJ8 genome. E.g., NCBI: NC 002077; NC 001401; NC001729; NC001829; NC006152; NC 006260; NC 006261; Kotin and Smith, The Springer Index of Viruses, available at the URL maintained by Springer (at www web address: oesys.springer.de/viruses/database/mkchapter.asp?virID=42.04.)(note—references to a URL or database refer to the contents of the URL or database as of the effective filing date of this application) In a particular embodiment, the ceDNA-plasmid backbone is derived from the AAV2 genome. In another particular embodiment, the ceDNA-plasmid backbone is a synthetic backbone genetically engineered to include at its 5′ and 3′ ITRs derived from one of these AAV genomes.

[0328] A ceDNA-plasmid can optionally include a selectable or selection marker for use in the establishment of a ceDNA vector-producing cell line. In one embodiment, the selection marker can be inserted downstream (i.e., 3′) of the 3′ ITR sequence. In another embodiment, the selection marker can be inserted upstream (i.e., 5′) of the 5′ ITR sequence. Appropriate selection markers include, for example, those that confer drug resistance. Selection markers can be, for example, a blasticidin S-resistance gene, kanamycin, geneticin, and the like. In a preferred embodiment, the drug selection marker is a blasticidin S-resistance gene.

[0329] An exemplary ceDNA (e.g., rAAV0) vector for expression of FVIII protein is produced from an rAAV plasmid. A method for the production of a rAAV vector, can comprise: (a) providing a host cell with a rAAV plasmid as described above, wherein both the host cell and the plasmid are devoid of capsid protein encoding genes, (b) culturing the host cell under conditions allowing production of an ceDNA genome, and (c) harvesting the cells and isolating the AAV genome produced from said cells.

C. Exemplary Method of Making the ceDNA Vectors from ceDNA Plasmids

[0330] Methods for making capsid-less ceDNA vectors for expression of FVIII protein are also provided herein, notably a method with a sufficiently high yield to provide sufficient vector for in vivo experiments.

[0331] In some embodiments, a method for the production of a ceDNA vector for expression of FVIII protein comprises the steps of: (1) introducing the nucleic acid construct comprising an expression cassette and two symmetric ITR sequences into a host cell (e.g., Sf9 cells), (2) optionally, establishing a clonal cell line, for example, by using a selection marker present on the plasmid, (3) introducing a Rep coding gene (either by transfection or infection with a baculovirus carrying said gene) into said insect cell, and (4) harvesting the cell and purifying the ceDNA vector. The nucleic acid construct comprising an expression cassette and two ITR sequences described above for the production of ceDNA vector can be in the form of a ceDNA plasmid, or Bacmid or Baculovirus generated with the ceDNA plasmid as described below. The nucleic acid construct can be introduced into a host cell by transfection, viral transduction, stable integration, or other methods known in the art.

### D. Cell Lines

[0332] Host cell lines used in the production of a ceDNA vector for expression of FVIII protein can include insect cell lines derived from Spodoptera frugiperda, such as Sf9 Sf21, or Trichoplusia ni cell, or other invertebrate, vertebrate, or other eukaryotic cell lines including mammalian cells. Other cell lines known to an ordinarily skilled artisan can also be used, such as HEK293, Huh-7, HeLa, HepG2, HeplA, 911, CHO, COS, MeWo, NIH3T3, A549, HT1 180, monocytes, and mature and immature dendritic cells. Host cell lines can be transfected for stable expression of the ceDNA-plasmid for high yield ceDNA vector production.

[0333] CeDNA-plasmids can be introduced into Sf9 cells by transient transfection using reagents (e.g., liposomal, calcium phosphate) or physical means (e.g., electroporation) known in the art. Alternatively, stable Sf9 cell lines which have stably integrated the ceDNA-plasmid into their genomes can be established. Such stable cell lines can be established by incorporating a selection marker into the ceDNA-plasmid as described above. If the ceDNA-plasmid used to transfect the cell line includes a selection marker, such as an antibiotic, cells that have been transfected with the ceDNA-plasmid and integrated the ceDNA-plasmid DNA into their genome can be selected for by addition of the antibiotic to the cell growth media. Resistant clones of the cells can then be isolated by single-cell dilution or colony transfer techniques and propagated.

E. Isolating and Purifying ceDNA Vectors:

[0334] Examples of the process for obtaining and isolating ceDNA vectors are described in FIGS. 4A-4E and the specific examples below. ceDNA-vectors for expression of FVIII protein disclosed herein can be obtained from a producer cell expressing AAV Rep protein(s), further transformed with a ceDNA-plasmid, ceDNA-bacmid, or ceDNA-baculovirus. Plasmids useful for the production of ceDNA vectors include plasmids that encode FVIII protein, or plasmids encoding one or more REP proteins.

[0335] In one aspect, a polynucleotide encodes the AAV Rep protein (Rep 78 or 68) delivered to a producer cell in a plasmid (Rep-plasmid), a bacmid (Rep-bacmid), or a baculovirus (Rep-baculovirus). The Rep-plasmid, Rep-bacmid, and Rep-baculovirus can be generated by methods described above.

[0336] Methods to produce a ceDNA vector for expression of FVIII protein are described herein. Expression constructs used for generating a ceDNA vector for expression of FVIII protein as described herein can be a plasmid (e.g., ceDNA-plasmids), a Bacmid (e.g., ceDNA-bacmid), and/or a baculovirus (e.g., ceDNA-baculovirus). By way of an example only, a ceDNA-vector can be generated from the cells co-infected with ceDNA-baculovirus and Rep-baculovirus. Rep proteins produced from the Rep-baculovirus can replicate the ceDNA-baculovirus to generate ceDNA-vectors. Alternatively, ceDNA vectors for expression of FVIII protein can be generated from the cells stably transfected with a construct comprising a sequence encoding the AAV Rep protein (Rep78/52) delivered in Rep-plasmids, Rep-bacmids, or Rep-baculovirus. CeDNA-Baculovirus can be transiently transfected to the cells, be replicated by Rep protein and produce ceDNA vectors.

[0337] The bacmid (e.g., ceDNA-bacmid) can be transfected into permissive insect cells such as Sf9, Sf21, Tni (Trichoplusia ni) cell, High Five cell, and generate ceDNA-baculovirus, which is a recombinant baculovirus including the sequences comprising the symmetric ITRs and the expression cassette. ceDNA-baculovirus can be again infected into the insect cells to obtain a next generation of the recombinant baculovirus. Optionally, the step can be repeated once or multiple times to produce the recombinant baculovirus in a larger quantity.

[0338] The time for harvesting and collecting ceDNA vectors for expression of FVIII protein as described herein from the cells can be selected and optimized to achieve a high-yield production of the ceDNA vectors. For example, the harvest time can be selected in view of cell viability, cell morphology, cell growth, etc. Usually, cells can be harvested after sufficient time after baculoviral infection to produce ceDNA vectors (e.g., ceDNA vectors) but before majority of cells start to die because of the viral toxicity. The ceDNA-vectors can be isolated from the Sf9 cells using plasmid purification kits such as Qiagen ENDO-FREE PLASMID® kits. Other methods developed for plasmid isolation can be also adapted for ceDNA vectors. Generally, any art-known nucleic acid purification methods can be adopted, as well as commercially available DNA extraction kits.

[0339] Alternatively, purification can be implemented by subjecting a cell pellet to an alkaline lysis process, centrifuging the resulting lysate and performing chromatographic separation. As one non-limiting example, the process can be performed by loading the supernatant on an ion exchange column (e.g. SARTOBIND Q®) which retains nucleic acids, and then eluting (e.g. with a 1.2 M NaCl solution) and performing a further chromatographic purification on a gel filtration column (e.g. 6 fast flow GE). The capsid-free AAV vector is then recovered by, e.g., precipitation.

[0340] In some embodiments, ceDNA vectors for expression of FVIII protein can also be purified in the form of exosomes, or microparticles. It is known in the art that many cell types release not only soluble proteins, but also complex protein/nucleic acid cargoes via membrane microvesicle shedding (Cocucci et al, 2009; EP 10306226.1) Such vesicles include microvesicles (also referred to as microparticles) and exosomes (also referred to as nanovesicles), both of which comprise proteins and RNA as cargo. Microvesicles are generated from the direct budding of the plasma membrane, and exosomes are released into the extracellular environment upon fusion of multivesicular endosomes with the plasma membrane. Thus, ceDNA vector-containing microvesicles and/or exosomes can be isolated from cells that have been transduced with the ceDNA-plasmid or a bacmid or baculovirus generated with the ceDNA-plasmid.

[0341] Microvesicles can be isolated by subjecting culture medium to filtration or ultracentrifugation at 20,000×g, and exosomes at 100,000×g. The optimal duration of ultracentrifugation can be experimentally-determined and will depend on the particular cell type from which the vesicles are isolated. Preferably, the culture medium is first cleared by low-speed centrifugation (e.g., at 2000×g for 5-20 minutes) and subjected to spin concentration using, e.g., an AMICON® spin column (Millipore, Watford, UK). Microvesicles and exosomes can be further purified via FACS or MACS by using specific antibodies that recognize specific surface antigens present on the microvesicles and exosomes. Other microvesicle and exosome purification methods include, but are not limited to, immunoprecipitation, affinity chromatography, filtration, and magnetic beads coated with specific antibodies or aptamers. Upon purification, vesicles are washed with, e.g., phosphate-buffered saline. One advantage of using microvesicles or exosome to deliver ceDNA-containing vesicles is that these vesicles can be targeted to various cell types by including on their membrane proteins recognized by specific receptors on the respective cell types. (See also EP 10306226)

[0342] Another aspect of the invention herein relates to methods of purifying ceDNA vectors from host cell lines that have stably integrated a ceDNA construct into their own genome. In one embodiment, ceDNA vectors are purified as DNA molecules. In another embodiment, the ceDNA vectors are purified as exosomes or microparticles.

[0343] FIG. 5 of International application PCT/US18/49996 shows a gel confirming the production of ceDNA from multiple ceDNA-plasmid constructs using the method described in the Examples. The ceDNA is confirmed by a characteristic band pattern in the gel, as discussed with respect to FIG. 4D in the Examples.

### VII. Pharmaceutical Compositions

[0344] In another aspect, pharmaceutical compositions are provided. The pharmaceutical composition comprises a ceDNA vector for expression of FVIII protein as described herein and a pharmaceutically acceptable carrier or diluent.

[0345] The ceDNA vectors for expression of FVIII protein as disclosed herein can be incorporated into pharmaceutical compositions suitable for administration to a subject for in vivo delivery to cells, tissues, or organs of the subject. Typically, the pharmaceutical composition comprises a ceDNA-vector as disclosed herein and a pharmaceutically acceptable carrier. For example, the ceDNA vectors for expression of FVIII protein as described herein can be incorporated into a pharmaceutical composition suitable for a desired route of therapeutic administration (e.g., parenteral administration). Passive tissue transduction via high pressure intravenous or intra-arterial infusion, as well as intracellular injection, such as intranuclear microinjection or intracytoplasmic injection, are also contemplated. Pharmaceutical compositions for therapeutic purposes can be formulated as a solution, microemulsion, dispersion, liposomes, or other ordered structure suitable to high ceDNA vector concentration. Sterile injectable solutions can be prepared by incorporating the ceDNA vector compound in the required amount in an appropriate buffer with one or a combination of ingredients enumerated above, as required, followed by filtered sterilization including a ceDNA vector can be formulated to deliver a transgene in the nucleic acid to the cells of a recipient, resulting in the therapeutic expression of the transgene or donor sequence therein. The composition can also include a pharmaceutically acceptable carrier.

[0346] Pharmaceutically active compositions comprising a ceDNA vector for expression of FVIII protein can be formulated to deliver a transgene for various purposes to the cell, e.g., cells of a subject.

[0347] Pharmaceutical compositions for therapeutic purposes typically must be sterile and stable under the conditions of manufacture and storage. The composition can be formulated as a solution, microemulsion, dispersion, liposomes, or other ordered structure suitable to high ceDNA vector concentration. Sterile injectable solutions can be prepared by incorporating the ceDNA vector compound in the required amount in an appropriate buffer with one or a combination of ingredients enumerated above, as required, followed by filtered sterilization.

[0348] A ceDNA vector for expression of FVIII protein as disclosed herein can be incorporated into a pharmaceutical composition suitable for topical, systemic, intra-amniotic, intrathecal, intracranial, intra-arterial, intravenous, intralymphatic, intraperitoneal, subcutaneous, tracheal, intra-tissue (e.g., intramuscular, intracardiac, intrahepatic, intrarenal, intracerebral), intrathecal, intravesical, conjunctival (e.g., extra-orbital, intraorbital, retroorbital, intraretinal, subretinal, choroidal, sub-choroidal, intrastromal, intracameral and intravitreal), intracochlear, and mucosal (e.g., oral, rectal, nasal) administration. Passive tissue transduction via high pressure intravenous or intraarterial infusion, as well as intracellular injection, such as intranuclear microinjection or intracytoplasmic injection, are also contemplated.

[0349] In some aspects, the methods provided herein comprise delivering one or more ceDNA vectors for expression of FVIII protein as disclosed herein to a host cell. Also provided herein are cells produced by such methods, and organisms (such as animals, plants, or fungi) comprising or produced from such cells. Methods of delivery of nucleic acids can include lipofection, nucleofection, microinjection, biolistics, liposomes, immunoliposomes, polycation or lipid:nucleic acid conjugates, naked DNA, and agent-enhanced uptake of DNA. Lipofection is described in e.g., U.S. Pat. Nos. 5,049,386, 4,946,787; and 4,897,355) and lipofection reagents are sold commercially (e.g., Transfectam™ and Lipofectin™). Delivery can be to cells (e.g., in vitro or ex vivo administration) or target tissues (e.g., in vivo administration).

[0350] Various techniques and methods are known in the art for delivering nucleic acids to cells. For example, nucleic acids, such as ceDNA for expression of FVIII protein can be formulated into lipid nanoparticles (LNPs), lipidoids, liposomes, lipid nanoparticles, lipoplexes, or core-shell nanoparticles. Typically, LNPs are composed of nucleic acid (e.g., ceDNA) molecules, one or more ionizable or cationic lipids (or salts thereof), one or more non-ionic or neutral lipids (e.g., a phospholipid), a molecule that prevents aggregation (e.g., PEG or a PEG-lipid conjugate), and optionally a sterol (e.g., cholesterol).

[0351] Another method for delivering nucleic acids, such as ceDNA for expression of FVIII protein to a cell is by conjugating the nucleic acid with a ligand that is internalized by the cell. For example, the ligand can bind a receptor on the cell surface and internalized via endocytosis. The ligand can be covalently linked to a nucleotide in the nucleic acid. Exemplary conjugates for delivering nucleic acids into a cell are described, example, in WO2015/006740, WO2014/025805, WO2012/037254, WO2009/082606, WO2009/073809, WO2009/018332, WO2006/112872, WO2004/090108, WO2004/091515 and WO2017/177326.

[0352] Nucleic acids, such as ceDNA vectors for expression of FVIII protein can also be delivered to a cell by transfection. Useful transfection methods include, but are not limited to, lipid-mediated transfection, cationic polymer-mediated transfection, or calcium phosphate precipitation. Transfection reagents are well known in the art and include, but are not limited to, TurboFect Transfection Reagent (Thermo Fisher Scientific), Pro-Ject Reagent (Thermo Fisher Scientific), TRANSPASS™ P Protein Transfection Reagent (New England Biolabs), CHARIOT™ Protein Delivery Reagent (Active Motif), PROTEOJUICE™ Protein Transfection Reagent (EMD Millipore), 293fectin, LIPOFECTAMINE™ 2000, LIPOFECTAMINE™ 3000 (Thermo Fisher Scientific), LIPOFECTAMINE™ (Thermo Fisher Scientific), LIPOFECTIN™ (Thermo Fisher Scientific), DMRIE-C, CELLFECTIN™ (Thermo Fisher Scientific), OLIGOFECTAMINE™ (Thermo Fisher Scientific), LIPOFECTACE™, FUGENE™ (Roche, Basel, Switzerland), FUGENE™ HD (Roche), TRANSFECTAM™ (Transfectam, Promega, Madison, Wis.), TFX-10™ (Promega), TFX-20™ (Promega), TFX-50™ (Promega), TRANSFECTIN™ (BioRad, Hercules, Calif.), SILENTFECT™ (Bio-Rad), Effectene™ (Qiagen, Valencia, Calif), DC-chol (Avanti Polar Lipids), GENEPORTER™ (Gene Therapy Systems, San Diego, Calif), DHARMAFECT 1™ (Dharmacon, Lafayette, Colo.), DHARMAFECT 2™ (Dharmacon), DHARMAFECT 3™ (Dharmacon), DHARMAFECT 4™ (Dharmacon), ESCORT™ III (Sigma, St. Louis, Mo.), and ESCORT™ IV (Sigma Chemical Co.). Nucleic acids, such as ceDNA, can also be delivered to a cell via microfluidics methods known to those of skill in the art.

[0353] ceDNA vectors for expression of FVIII protein as described herein can also be administered directly to an organism for transduction of cells in vivo. Administration is by any of the routes normally used for introducing a molecule into ultimate contact with blood or tissue cells including, but not limited to, injection, infusion, topical application and electroporation. Suitable methods of administering such nucleic acids are available and well known to those of skill in the art, and, although more than one route can be used to administer a particular composition, a particular route can often provide a more immediate and more effective reaction than another route.

[0354] Methods for introduction of a nucleic acid vector ceDNA vector for expression of FVIII protein as disclosed herein can be delivered into hematopoietic stem cells, for example, by the methods as described, for example, in U.S. Pat. No. 5,928,638.

[0355] The ceDNA vectors for expression of FVIII protein in accordance with the present invention can be added to liposomes for delivery to a cell or target organ in a subject. Liposomes are vesicles that possess at least one lipid bilayer. Liposomes are typical used as carriers for drug/therapeutic delivery in the context of pharmaceutical development. They work by fusing with a cellular membrane and repositioning its lipid structure to deliver a drug or active pharmaceutical ingredient (API). Liposome compositions for such delivery are composed of phospholipids, especially compounds having a phosphatidylcholine group, however these compositions may also include other lipids. Exemplary liposomes and liposome formulations, including but not limited to polyethylene glycol (PEG)-functional group containing compounds are disclosed in International Application PCT/US2018/050042, filed on Sep. 7, 2018 and in International application PCT/US2018/064242, filed on Dec. 6, 2018, e.g., see the section entitled “Pharmaceutical Formulations”.

[0356] Various delivery methods known in the art or modification thereof can be used to deliver ceDNA vectors in vitro or in vivo. For example, in some embodiments, ceDNA vectors for expression of FVIII protein are delivered by making transient penetration in cell membrane by mechanical, electrical, ultrasonic, hydrodynamic, or laser-based energy so that DNA entrance into the targeted cells is facilitated. For example, a ceDNA vector can be delivered by transiently disrupting cell membrane by squeezing the cell through a size-restricted channel or by other means known in the art. In some cases, a ceDNA vector alone is directly injected as naked DNA into any one of any one or more tissues selected from: liver, kidneys, gallbladder, prostate, adrenal gland, heart, intestine, lung, and stomach, skin, thymus, cardiac muscle or skeletal muscle. In some cases, a ceDNA vector is delivered by gene gun. Gold or tungsten spherical particles (1-3 μm diameter) coated with capsid-free AAV vectors can be accelerated to high speed by pressurized gas to penetrate into target tissue cells.

[0357] Compositions comprising a ceDNA vector for expression of FVIII protein and a pharmaceutically acceptable carrier are specifically contemplated herein. In some embodiments, the ceDNA vector is formulated with a lipid delivery system, for example, liposomes as described herein. In some embodiments, such compositions are administered by any route desired by a skilled practitioner. The compositions may be administered to a subject by different routes including orally, parenterally, sublingually, transdermally, rectally, transmucosally, topically, via inhalation, via buccal administration, intrapleurally, intravenous, intra-arterial, intraperitoneal, subcutaneous, intramuscular, intranasal intrathecal, and intraarticular or combinations thereof. For veterinary use, the composition may be administered as a suitably acceptable formulation in accordance with normal veterinary practice. The veterinarian may readily determine the dosing regimen and route of administration that is most appropriate for a particular animal. The compositions may be administered by traditional syringes, needleless injection devices, “microprojectile bombardment gene guns”, or other physical methods such as electroporation (“EP”), hydrodynamic methods, or ultrasound.

[0358] In some cases, a ceDNA vector for expression of FVIII protein is delivered by hydrodynamic injection, which is a simple and highly efficient method for direct intracellular delivery of any water-soluble compounds and particles into internal organs and skeletal muscle in an entire limb.

[0359] In some cases, ceDNA vectors for expression of FVIII protein are delivered by ultrasound by making nanoscopic pores in membrane to facilitate intracellular delivery of DNA particles into cells of internal organs or tumors, so the size and concentration of plasmid DNA have great role in efficiency of the system. In some cases, ceDNA vectors are delivered by magnetofection by using magnetic fields to concentrate particles containing nucleic acid into the target cells.

[0360] In some cases, chemical delivery systems can be used, for example, by using nanomeric complexes, which include compaction of negatively charged nucleic acid by polycationic nanomeric particles, belonging to cationic liposome/micelle or cationic polymers. Cationic lipids used for the delivery method includes, but not limited to monovalent cationic lipids, polyvalent cationic lipids, guanidine containing compounds, cholesterol derivative compounds, cationic polymers, (e.g., poly(ethylenimine), poly-L-lysine, protamine, other cationic polymers), and lipid-polymer hybrid.

### A. Exosomes

[0361] In some embodiments, a ceDNA vector for expression of FVIII protein as disclosed herein is delivered by being packaged in an exosome. Exosomes are small membrane vesicles of endocytic origin that are released into the extracellular environment following fusion of multivesicular bodies with the plasma membrane. Their surface consists of a lipid bilayer from the donor cell's cell membrane, they contain cytosol from the cell that produced the exosome, and exhibit membrane proteins from the parental cell on the surface. Exosomes are produced by various cell types including epithelial cells, B and T lymphocytes, mast cells (MC) as well as dendritic cells (DC). Some embodiments, exosomes with a diameter between 10 nm and 1 m, between 20 nm and 500 nm, between 30 nm and 250 nm, between 50 nm and 100 nm are envisioned for use. Exosomes can be isolated for a delivery to target cells using either their donor cells or by introducing specific nucleic acids into them. Various approaches known in the art can be used to produce exosomes containing capsid-free AAV vectors of the present invention.

### B. Microparticle/Nanoparticles

[0362] In some embodiments, a ceDNA vector for expression of FVIII protein as disclosed herein is delivered by a lipid nanoparticle. Generally, lipid nanoparticles comprise an ionizable amino lipid (e.g., heptatriaconta-6,9,28,31-tetraen-19-yl 4-(dimethylamino)butanoate, DLin-MC3-DMA, a phosphatidylcholine (1,2-distearoyl-sn-glycero-3-phosphocholine, DSPC), cholesterol and a coat lipid (polyethylene glycol-dimyristolglycerol, PEG-DMG), for example as disclosed by Tam et al. (2013). Advances in Lipid Nanoparticles for siRNA delivery. Pharmaceuticals 5(3): 498-507.

[0363] In some embodiments, a lipid nanoparticle has a mean diameter between about 10 and about 1000 nm. In some embodiments, a lipid nanoparticle has a diameter that is less than 300 nm. In some embodiments, a lipid nanoparticle has a diameter between about 10 and about 300 nm. In some embodiments, a lipid nanoparticle has a diameter that is less than 200 nm. In some embodiments, a lipid nanoparticle has a diameter between about 25 and about 200 nm. In some embodiments, a lipid nanoparticle preparation (e.g., composition comprising a plurality of lipid nanoparticles) has a size distribution in which the mean size (e.g., diameter) is about 70 nm to about 200 nm, and more typically the mean size is about 100 nm or less.

[0364] Various lipid nanoparticles known in the art can be used to deliver ceDNA vector for expression of FVIII protein as disclosed herein. For example, various delivery methods using lipid nanoparticles are described in U.S. Pat. Nos. 9,404,127, 9,006,417 and 9,518,272.

[0365] In some embodiments, a ceDNA vector for expression of FVIII protein as disclosed herein is delivered by a gold nanoparticle. Generally, a nucleic acid can be covalently bound to a gold nanoparticle or non-covalently bound to a gold nanoparticle (e.g., bound by a charge-charge interaction), for example as described by Ding et al. (2014). Gold Nanoparticles for Nucleic Acid Delivery. Mol. Ther. 22(6); 1075-1083. In some embodiments, gold nanoparticle-nucleic acid conjugates are produced using methods described, for example, in U.S. Pat. No. 6,812,334.

### C. Conjugates

[0366] In some embodiments, a ceDNA vector for expression of FVIII protein as disclosed herein is conjugated (e.g., covalently bound to an agent that increases cellular uptake. An “agent that increases cellular uptake” is a molecule that facilitates transport of a nucleic acid across a lipid membrane. For example, a nucleic acid can be conjugated to a lipophilic compound (e.g., cholesterol, tocopherol, etc.), a cell penetrating peptide (CPP) (e.g., penetratin, TAT, Syn1B, etc.), and polyamines (e.g., spermine). Further examples of agents that increase cellular uptake are disclosed, for example, in Winkler (2013). Oligonucleotide conjugates for therapeutic applications. Ther. Deliv. 4(7); 791-809.

[0367] In some embodiments, a ceDNA vector for expression of FVIII protein as disclosed herein is conjugated to a polymer (e.g., a polymeric molecule) or a folate molecule (e.g., folic acid molecule). Generally, delivery of nucleic acids conjugated to polymers is known in the art, for example as described in WO2000/34343 and WO2008/022309. In some embodiments, a ceDNA vector for expression of FVIII protein as disclosed herein is conjugated to a poly(amide) polymer, for example as described by U.S. Pat. No. 8,987,377. In some embodiments, a nucleic acid described by the disclosure is conjugated to a folic acid molecule as described in U.S. Pat. No. 8,507,455.

[0368] In some embodiments, a ceDNA vector for expression of FVIII protein as disclosed herein is conjugated to a carbohydrate, for example as described in U.S. Pat. No. 8,450,467.

### D. Nanocapsule

[0369] Alternatively, nanocapsule formulations of a ceDNA vector for expression of FVIII protein as disclosed herein can be used. Nanocapsules can generally entrap substances in a stable and reproducible way. To avoid side effects due to intracellular polymeric overloading, such ultrafine particles (sized around 0.1 μm) should be designed using polymers able to be degraded in vivo. Biodegradable polyalkyl-cyanoacrylate nanoparticles that meet these requirements are contemplated for use.

### E. Liposomes

[0370] The ceDNA vectors for expression of FVIII protein in accordance with the present invention can be added to liposomes for delivery to a cell or target organ in a subject. Liposomes are vesicles that possess at least one lipid bilayer. Liposomes are typical used as carriers for drug/therapeutic delivery in the context of pharmaceutical development. They work by fusing with a cellular membrane and repositioning its lipid structure to deliver a drug or active pharmaceutical ingredient (API). Liposome compositions for such delivery are composed of phospholipids, especially compounds having a phosphatidylcholine group, however these compositions may also include other lipids.

[0371] The formation and use of liposomes are generally known to those of skill in the art. Liposomes have been developed with improved serum stability and circulation half-times (U.S. Pat. No. 5,741,516). Further, various methods of liposome and liposome like preparations as potential drug carriers have been described (U.S. Pat. Nos. 5,567,434; 5,552,157; 5,565,213; 5,738,868 and 5,795,587).

### F. Exemplary Liposome and Lipid Nanoparticle (LNP) Compositions

[0372] The ceDNA vectors for expression of FVIII protein in accordance with the present invention can be added to liposomes for delivery to a cell, e.g., a cell in need of expression of the transgene. Liposomes are vesicles that possess at least one lipid bilayer. Liposomes are typical used as carriers for drug/therapeutic delivery in the context of pharmaceutical development. They work by fusing with a cellular membrane and repositioning its lipid structure to deliver a drug or active pharmaceutical ingredient (API). Liposome compositions for such delivery are composed of phospholipids, especially compounds having a phosphatidylcholine group, however these compositions may also include other lipids.

[0373] Lipid nanoparticles (LNPs) comprising ceDNA vectors are disclosed in International Application PCT/US2018/050042, filed on Sep. 7, 2018, and International Application PCT/US2018/064242, filed on Dec. 6, 2018 which are incorporated herein in their entirety and envisioned for use in the methods and compositions for ceDNA vectors for expression of FVIII protein as disclosed herein.

[0374] In some aspects, the disclosure provides for a liposome formulation that includes one or more compounds with a polyethylene glycol (PEG) functional group (so-called “PEG-ylated compounds”) which can reduce the immunogenicity/antigenicity of, provide hydrophilicity and hydrophobicity to the compound(s) and reduce dosage frequency. Or the liposome formulation simply includes polyethylene glycol (PEG) polymer as an additional component. In such aspects, the molecular weight of the PEG or PEG functional group can be from 62 Da to about 5,000 Da.

[0375] In some aspects, the disclosure provides for a liposome formulation that will deliver an API with extended release or controlled release profile over a period of hours to weeks. In some related aspects, the liposome formulation may comprise aqueous chambers that are bound by lipid bilayers. In other related aspects, the liposome formulation encapsulates an API with components that undergo a physical transition at elevated temperature which releases the API over a period of hours to weeks.

[0376] In some aspects, the liposome formulation comprises sphingomyelin and one or more lipids disclosed herein. In some aspects, the liposome formulation comprises optisomes.

[0377] In some aspects, the disclosure provides for a liposome formulation that includes one or more lipids selected from: N-(carbonyl-methoxypolyethylene glycol 2000)-1,2-distearoyl-sn-glycero-3-phosphoethanolamine sodium salt, (distearoyl-sn-glycero-phosphoethanolamine), MPEG (methoxy polyethylene glycol)-conjugated lipid, HSPC (hydrogenated soy phosphatidylcholine); PEG (polyethylene glycol); DSPE (distearoyl-sn-glycero-phosphoethanolamine); DSPC (distearoylphosphatidylcholine); DOPC (dioleoylphosphatidylcholine); DPPG (dipalmitoylphosphatidylglycerol); EPC (egg phosphatidylcholine); DOPS (dioleoylphosphatidylserine); POPC (palmitoyloleoylphosphatidylcholine); SM (sphingomyelin); MPEG (methoxy polyethylene glycol); DMPC (dimyristoyl phosphatidylcholine); DMPG (dimyristoyl phosphatidylglycerol); DSPG (distearoylphosphatidylglycerol); DEPC (dierucoylphosphatidylcholine); DOPE (dioleoly-sn-glycero-phophoethanolamine); cholesteryl sulphate (CS); dipalmitoylphosphatidylglycerol (DPPG); DOPC (dioleoly-sn-glycero-phosphatidylcholine) or any combination thereof.

[0378] In some aspects, the disclosure provides for a liposome formulation comprising phospholipid, cholesterol and a PEG-ylated lipid in a molar ratio of 56:38:5. In some aspects, the liposome formulation's overall lipid content is from 2-16 mg/mL. In some aspects, the disclosure provides for a liposome formulation comprising a lipid containing a phosphatidylcholine functional group, a lipid containing an ethanolamine functional group and a PEG-ylated lipid. In some aspects, the disclosure provides for a liposome formulation comprising a lipid containing a phosphatidylcholine functional group, a lipid containing an ethanolamine functional group and a PEG-ylated lipid in a molar ratio of 3:0.015:2 respectively. In some aspects, the disclosure provides for a liposome formulation comprising a lipid containing a phosphatidylcholine functional group, cholesterol and a PEG-ylated lipid. In some aspects, the disclosure provides for a liposome formulation comprising a lipid containing a phosphatidylcholine functional group and cholesterol. In some aspects, the PEG-ylated lipid is PEG-2000-DSPE. In some aspects, the disclosure provides for a liposome formulation comprising DPPG, soy PC, MPEG-DSPE lipid conjugate and cholesterol.

[0379] In some aspects, the disclosure provides for a liposome formulation comprising one or more lipids containing a phosphatidylcholine functional group and one or more lipids containing an ethanolamine functional group. In some aspects, the disclosure provides for a liposome formulation comprising one or more: lipids containing a phosphatidylcholine functional group, lipids containing an ethanolamine functional group, and sterols, e.g. cholesterol. In some aspects, the liposome formulation comprises DOPC/DEPC; and DOPE.

[0380] In some aspects, the disclosure provides for a liposome formulation further comprising one or more pharmaceutical excipients, e.g. sucrose and/or glycine.

[0381] In some aspects, the disclosure provides for a liposome formulation that is either unilamellar or multilamellar in structure. In some aspects, the disclosure provides for a liposome formulation that comprises multi-vesicular particles and/or foam-based particles. In some aspects, the disclosure provides for a liposome formulation that are larger in relative size to common nanoparticles and about 150 to 250 nm in size. In some aspects, the liposome formulation is a lyophilized powder.

[0382] In some aspects, the disclosure provides for a liposome formulation that is made and loaded with ceDNA vectors disclosed or described herein, by adding a weak base to a mixture having the isolated ceDNA outside the liposome. This addition increases the pH outside the liposomes to approximately 7.3 and drives the API into the liposome. In some aspects, the disclosure provides for a liposome formulation having a pH that is acidic on the inside of the liposome. In such cases the inside of the liposome can be at pH 4-6.9, and more preferably pH 6.5. In other aspects, the disclosure provides for a liposome formulation made by using intra-liposomal drug stabilization technology. In such cases, polymeric or non-polymeric highly charged anions and intra-liposomal trapping agents are utilized, e.g. polyphosphate or sucrose octasulfate.

[0383] In some aspects, the disclosure provides for a lipid nanoparticle comprising ceDNA and an ionizable lipid. For example, a lipid nanoparticle formulation that is made and loaded with ceDNA obtained by the process as disclosed in International Application PCT/US2018/050042, filed on Sep. 7, 2018, which is incorporated herein. This can be accomplished by high energy mixing of ethanolic lipids with aqueous ceDNA at low pH which protonates the ionizable lipid and provides favorable energetics for ceDNA/lipid association and nucleation of particles. The particles can be further stabilized through aqueous dilution and removal of the organic solvent. The particles can be concentrated to the desired level.

[0384] Generally, the lipid particles are prepared at a total lipid to ceDNA (mass or weight) ratio of from about 10:1 to 30:1. In some embodiments, the lipid to ceDNA ratio (mass/mass ratio; w/w ratio) can be in the range of from about 1:1 to about 25:1, from about 10:1 to about 14:1, from about 3:1 to about 15:1, from about 4:1 to about 10:1, from about 5:1 to about 9:1, or about 6:1 to about 9:1. The amounts of lipids and ceDNA can be adjusted to provide a desired N/P ratio, for example, N/P ratio of 3, 4, 5, 6, 7, 8, 9, 10 or higher. Generally, the lipid particle formulation's overall lipid content can range from about 5 mg/ml to about 30 mg/mL.

[0385] The ionizable lipid is typically employed to condense the nucleic acid cargo, e.g., ceDNA at low pH and to drive membrane association and fusogenicity. Generally, ionizable lipids are lipids comprising at least one amino group that is positively charged or becomes protonated under acidic conditions, for example at pH of 6.5 or lower. Ionizable lipids are also referred to as cationic lipids herein.

[0386] Exemplary ionizable lipids are described in International PCT patent publications WO2015/095340, WO2015/199952, WO2018/011633, WO2017/049245, WO2015/061467, WO2012/040184, WO2012/000104, WO2015/074085, WO2016/081029, WO2017/004143, WO2017/075531, WO2017/117528, WO2011/022460, WO2013/148541, WO2013/116126, WO2011/153120, WO2012/044638, WO2012/054365, WO2011/090965, WO2013/016058, WO2012/162210, WO2008/042973, WO2010/129709, WO2010/144740, WO2012/099755, WO2013/049328, WO2013/086322, WO2013/086373, WO2011/071860, WO2009/132131, WO2010/048536, WO2010/088537, WO2010/054401, WO2010/054406, WO2010/054405, WO2010/054384, WO2012/016184, WO2009/086558, WO2010/042877, WO2011/000106, WO2011/000107, WO2005/120152, WO2011/141705, WO2013/126803, WO2006/007712, WO2011/038160, WO2005/121348, WO2011/066651, WO2009/127060, WO2011/141704, WO2006/069782, WO2012/031043, WO2013/006825, WO2013/033563, WO2013/089151, WO2017/099823, WO2015/095346, and WO2013/086354, and US patent publications US2016/0311759, US2015/0376115, US2016/0151284, US2017/0210697, US2015/0140070, US2013/0178541, US2013/0303587, US2015/0141678, US2015/0239926, US2016/0376224, US2017/0119904, US2012/0149894, US2015/0057373, US2013/0090372, US2013/0274523, US2013/0274504, US2013/0274504, US2009/0023673, US2012/0128760, US2010/0324120, US2014/0200257, US2015/0203446, US2018/0005363, US2014/0308304, US2013/0338210, US2012/0101148, US2012/0027796, US2012/0058144, US2013/0323269, US2011/0117125, US2011/0256175, US2012/0202871, US2011/0076335, US2006/0083780, US2013/0123338, US2015/0064242, US2006/0051405, US2013/0065939, US2006/0008910, US2003/0022649, US2010/0130588, US2013/0116307, US2010/0062967, US2013/0202684, US2014/0141070, US2014/0255472, US2014/0039032, US2018/0028664, US2016/0317458, and US2013/0195920, the contents of all of which are incorporated herein by reference in their entirety.

[0387] In some embodiments, the ionizable lipid is MC3 (6Z,9Z,28Z,31Z)-heptatriaconta-6,9,28,31-tetraen-19-yl-4-(dimethylamino) butanoate (DLin-MC3-DMA or MC3) having the following structure:

[chemical structure]

[0388] The lipid DLin-MC3-DMA is described in Jayaraman et al., Angew. Chem. Int. Ed Engl. (2012), 51(34): 8529-8533, content of which is incorporated herein by reference in its entirety.

[0389] In some embodiments, the ionizable lipid is the lipid ATX-002 as described in WO2015/074085, content of which is incorporated herein by reference in its entirety.

[0390] In some embodiments, the ionizable lipid is (13Z,16Z)—N,N-dimethyl-3-nonyldocosa-13,16-dien-1-amine (Compound 32), as described in WO2012/040184, content of which is incorporated herein by reference in its entirety.

[0391] In some embodiments, the ionizable lipid is Compound 6 or Compound 22 as described in WO2015/199952, content of which is incorporated herein by reference in its entirety.

[0392] Without limitations, ionizable lipid can comprise 20-90% (mol) of the total lipid present in the lipid nanoparticle. For example, ionizable lipid molar content can be 20-70% (mol), 30-60% (mol) or 40-50% (mol) of the total lipid present in the lipid nanoparticle. In some embodiments, ionizable lipid comprises from about 50 mol % to about 90 mol % of the total lipid present in the lipid nanoparticle.

[0393] In some aspects, the lipid nanoparticle can further comprise a non-cationic lipid. Non-ionic lipids include amphipathic lipids, neutral lipids and anionic lipids. Accordingly, the non-cationic lipid can be a neutral uncharged, zwitterionic, or anionic lipid. Non-cationic lipids are typically employed to enhance fusogenicity.

[0394] Exemplary non-cationic lipids envisioned for use in the methods and compositions as disclosed herein are described in International Application PCT/US2018/050042, filed on Sep. 7, 2018, and PCT/US2018/064242, filed on Dec. 6, 2018 which is incorporated herein in its entirety. Exemplary non-cationic lipids are described in International Application Publication WO2017/099823 and US patent publication US2018/0028664, the contents of both of which are incorporated herein by reference in their entirety.

[0395] The non-cationic lipid can comprise 0-30% (mol) of the total lipid present in the lipid nanoparticle. For example, the non-cationic lipid content is 5-20% (mol) or 10-15% (mol) of the total lipid present in the lipid nanoparticle. In various embodiments, the molar ratio of ionizable lipid to the neutral lipid ranges from about 2:1 to about 8:1.

[0396] In some embodiments, the lipid nanoparticles do not comprise any phospholipids. In some aspects, the lipid nanoparticle can further comprise a component, such as a sterol, to provide membrane integrity.

[0397] One exemplary sterol that can be used in the lipid nanoparticle is cholesterol and derivatives thereof. Exemplary cholesterol derivatives are described in International application WO2009/127060 and US patent publication US2010/0130588, contents of both of which are incorporated herein by reference in their entirety.

[0398] The component providing membrane integrity, such as a sterol, can comprise 0-50% (mol) of the total lipid present in the lipid nanoparticle. In some embodiments, such a component is 20-50% (mol) 30-40% (mol) of the total lipid content of the lipid nanoparticle.

[0399] In some aspects, the lipid nanoparticle can further comprise a polyethylene glycol (PEG) or a conjugated lipid molecule. Generally, these are used to inhibit aggregation of lipid nanoparticles and/or provide steric stabilization. Exemplary conjugated lipids include, but are not limited to, PEG-lipid conjugates, polyoxazoline (POZ)-lipid conjugates, polyamide-lipid conjugates (such as ATTA-lipid conjugates), cationic-polymer lipid (CPL) conjugates, and mixtures thereof. In some embodiments, the conjugated lipid molecule is a PEG-lipid conjugate, for example, a (methoxy polyethylene glycol)-conjugated lipid. Exemplary PEG-lipid conjugates include, but are not limited to, PEG-diacylglycerol (DAG) (such as 1-(monomethoxy-polyethyleneglycol)-2,3-dimyristoylglycerol (PEG-DMG)), PEG-dialkyloxypropyl (DAA), PEG-phospholipid, PEG-ceramide (Cer), a pegylated phosphatidylethanoloamine (PEG-PE), PEG succinate diacylglycerol (PEGS-DAG) (such as 4-O-(2′,3′-di(tetradecanoyloxy)propyl-1-O-(w-methoxy(polyethoxy)ethyl) butanedioate (PEG-S-DMG)), PEG dialkoxypropylcarbam, N-(carbonyl-methoxypolyethylene glycol 2000)-1,2-distearoyl-sn-glycero-3-phosphoethanolamine sodium salt, or a mixture thereof. Additional exemplary PEG-lipid conjugates are described, for example, in U.S. Pat. Nos. 5,885,613, 6,287,591, US2003/0077829, US2003/0077829, US2005/0175682, US2008/0020058, US2011/0117125, US2010/0130588, US2016/0376224, and US2017/0119904, the contents of all of which are incorporated herein by reference in their entirety.

[0400] In some embodiments, a PEG-lipid is a compound as defined in US2018/0028664, the content of which is incorporated herein by reference in its entirety. In some embodiments, a PEG-lipid is disclosed in US20150376115 or in US2016/0376224, the content of both of which is incorporated herein by reference in its entirety.

[0401] The PEG-DAA conjugate can be, for example, PEG-dilauryloxypropyl, PEG-dimyristyloxypropyl, PEG-dipalmityloxypropyl, or PEG-distearyloxypropyl. The PEG-lipid can be one or more of PEG-DMG, PEG-dilaurylglycerol, PEG-dipalmitoylglycerol, PEG-disterylglycerol, PEG-dilaurylglycamide, PEG-dimyristylglycamide, PEG-dipalmitoylglycamide, PEG-disterylglycamide, PEG-cholesterol (1-[8′-(Cholest-5-en-3[beta]-oxy)carboxamido-3′,6′-dioxaoctanyl]carbamoyl-[omega]-methyl-poly(ethylene glycol), PEG-DMB (3,4-Ditetradecoxylbenzyl-[omega]-methyl-poly(ethylene glycol) ether), and 1,2-dimyristoyl-sn-glycero-3-phosphoethanolamine-N-[methoxy(polyethylene glycol)-2000]. In some examples, the PEG-lipid can be selected from the group consisting of PEG-DMG, 1,2-dimyristoyl-sn-glycero-3-phosphoethanolamine-N-[methoxy(polyethylene glycol)-2000],

[0402] Lipids conjugated with a molecule other than a PEG can also be used in place of PEG-lipid. For example, polyoxazoline (POZ)-lipid conjugates, polyamide-lipid conjugates (such as ATTA-lipid conjugates), and cationic-polymer lipid (CPL) conjugates can be used in place of or in addition to the PEG-lipid. Exemplary conjugated lipids, i.e., PEG-lipids, (POZ)-lipid conjugates, ATTA-lipid conjugates and cationic polymer-lipids are described in the International patent application publications WO1996/010392, WO1998/051278, WO2002/087541, WO2005/026372, WO2008/147438, WO2009/086558, WO2012/000104, WO2017/117528, WO2017/099823, WO2015/199952, WO2017/004143, WO2015/095346, WO2012/000104, WO2012/000104, and WO2010/006282, US patent application publications US2003/0077829, US2005/0175682, US2008/0020058, US2011/0117125, US2013/0303587, US2018/0028664, US2015/0376115, US2016/0376224, US2016/0317458, US2013/0303587, US2013/0303587, and US20110123453, and US patents U.S. Pat. Nos. 5,885,613, 6,287,591, 6,320,017, and 6,586,559, the contents of all of which are incorporated herein by reference in their entirety.

[0403] In some embodiments, the one or more additional compound can be a therapeutic agent. The therapeutic agent can be selected from any class suitable for the therapeutic objective. In other words, the therapeutic agent can be selected from any class suitable for the therapeutic objective. In other words, the therapeutic agent can be selected according to the treatment objective and biological action desired. For example, if the ceDNA within the LNP is useful for treating hemophilia A, the additional compound can be an anti-hemophilia A agent (e.g., a chemotherapeutic agent, or other hemophilia A therapy (including, but not limited to, a small molecule or an antibody). In another example, if the LNP containing the ceDNA is useful for treating an infection, the additional compound can be an antimicrobial agent (e.g., an antibiotic or antiviral compound). In yet another example, if the LNP containing the ceDNA is useful for treating an immune disease or disorder, the additional compound can be a compound that modulates an immune response (e.g., an immunosuppressant, immunostimulatory compound, or compound modulating one or more specific immune pathways). In some embodiments, different cocktails of different lipid nanoparticles containing different compounds, such as a ceDNA encoding a different protein or a different compound, such as a therapeutic may be used in the compositions and methods of the invention.

[0404] In some embodiments, the additional compound is an immune modulating agent. For example, the additional compound is an immunosuppressant. In some embodiments, the additional compound is immune stimulatory agent. Also provided herein is a pharmaceutical composition comprising the lipid nanoparticle-encapsulated insect-cell produced, or a synthetically produced ceDNA vector for expression of FVIII protein as described herein and a pharmaceutically acceptable carrier or excipient.

[0405] In some aspects, the disclosure provides for a lipid nanoparticle formulation further comprising one or more pharmaceutical excipients. In some embodiments, the lipid nanoparticle formulation further comprises sucrose, tris, trehalose and/or glycine.

[0406] The ceDNA vector can be complexed with the lipid portion of the particle or encapsulated in the lipid position of the lipid nanoparticle. In some embodiments, the ceDNA can be fully encapsulated in the lipid position of the lipid nanoparticle, thereby protecting it from degradation by a nuclease, e.g., in an aqueous solution. In some embodiments, the ceDNA in the lipid nanoparticle is not substantially degraded after exposure of the lipid nanoparticle to a nuclease at 37° C. for at least about 20, 30, 45, or 60 minutes. In some embodiments, the ceDNA in the lipid nanoparticle is not substantially degraded after incubation of the particle in serum at 37° C. for at least about 30, 45, or 60 minutes or at least about 2, 3, 4, 5, 6, 7, 8, 9, 10, 12, 14, 16, 18, 20, 22, 24, 26, 28, 30, 32, 34, or 36 hours.

[0407] In certain embodiments, the lipid nanoparticles are substantially non-toxic to a subject, e.g., to a mammal such as a human. In some aspects, the lipid nanoparticle formulation is a lyophilized powder.

[0408] In some embodiments, lipid nanoparticles are solid core particles that possess at least one lipid bilayer. In other embodiments, the lipid nanoparticles have a non-bilayer structure, i.e., a non-lamellar (i.e., non-bilayer) morphology. Without limitations, the non-bilayer morphology can include, for example, three dimensional tubes, rods, cubic symmetries, etc. For example, the morphology of the lipid nanoparticles (lamellar vs. non-lamellar) can readily be assessed and characterized using, e.g., Cryo-TEM analysis as described in US2010/0130588, the content of which is incorporated herein by reference in its entirety.

[0409] In some further embodiments, the lipid nanoparticles having a non-lamellar morphology are electron dense. In some aspects, the disclosure provides for a lipid nanoparticle that is either unilamellar or multilamellar in structure. In some aspects, the disclosure provides for a lipid nanoparticle formulation that comprises multi-vesicular particles and/or foam-based particles.

[0410] By controlling the composition and concentration of the lipid components, one can control the rate at which the lipid conjugate exchanges out of the lipid particle and, in turn, the rate at which the lipid nanoparticle becomes fusogenic. In addition, other variables including, e.g., pH, temperature, or ionic strength, can be used to vary and/or control the rate at which the lipid nanoparticle becomes fusogenic. Other methods which can be used to control the rate at which the lipid nanoparticle becomes fusogenic will be apparent to those of ordinary skill in the art based on this disclosure. It will also be apparent that by controlling the composition and concentration of the lipid conjugate, one can control the lipid particle size.

[0411] The pKa of formulated cationic lipids can be correlated with the effectiveness of the LNPs for delivery of nucleic acids (see Jayaraman et al., Angewandte Chemie, International Edition (2012), 51(34), 8529-8533; Semple et al., Nature Biotechnology 28, 172-176 (2010), both of which are incorporated by reference in their entirety). The preferred range of pKa is ˜5 to ˜7. The pKa of the cationic lipid can be determined in lipid nanoparticles using an assay based on fluorescence of 2-(p-toluidino)-6-napthalene sulfonic acid (TNS).

### VIII. Methods of Use

[0412] A ceDNA vector for expression of FVIII protein as disclosed herein can also be used in a method for the delivery of a nucleotide sequence of interest (e.g., encoding FVIII protein) to a target cell (e.g., a host cell). The method may in particular be a method for delivering FVIII protein to a cell of a subject in need thereof and treating hemophilia A. The invention allows for the in vivo expression of FVIII protein encoded in the ceDNA vector in a cell in a subject such that therapeutic effect of the expression of FVIII protein occurs. These results are seen with both in vivo and in vitro modes of ceDNA vector delivery.

[0413] In addition, the invention provides a method for the delivery of FVIII protein in a cell of a subject in need thereof, comprising multiple administrations of the ceDNA vector of the invention encoding said FVIII protein. Since the ceDNA vector of the invention does not induce an immune response like that typically observed against encapsidated viral vectors, such a multiple administration strategy will likely have greater success in a ceDNA-based system. The ceDNA vector are administered in sufficient amounts to transfect the cells of a desired tissue and to provide sufficient levels of gene transfer and expression of the FVIII protein without undue adverse effects. Conventional and pharmaceutically acceptable routes of administration include, but are not limited to, retinal administration (e.g., subretinal injection, suprachoroidal injection or intravitreal injection), intravenous (e.g., in a liposome formulation), direct delivery to the selected organ (e.g., any one or more tissues selected from: liver, kidneys, gallbladder, prostate, adrenal gland, heart, intestine, lung, and stomach), intramuscular, and other parental routes of administration. Routes of administration may be combined, if desired.

[0414] Delivery of a ceDNA vector for expression of FVIII protein as described herein is not limited to delivery of the expressed FVIII protein. For example, conventionally produced (e.g., using a cell-based production method (e.g., insect-cell production methods) or synthetically produced ceDNA vectors as described herein may be used with other delivery systems provided to provide a portion of the gene therapy. One non-limiting example of a system that may be combined with the ceDNA vectors in accordance with the present disclosure includes systems which separately deliver one or more co-factors or immune suppressors for effective gene expression of the ceDNA vector expressing the FVIII protein.

[0415] The invention also provides for a method of treating hemophilia A in a subject comprising introducing into a target cell in need thereof (in particular a muscle cell or tissue) of the subject a therapeutically effective amount of a ceDNA vector, optionally with a pharmaceutically acceptable carrier. While the ceDNA vector can be introduced in the presence of a carrier, such a carrier is not required. The ceDNA vector selected comprises a nucleotide sequence encoding an FVIII protein useful for treating hemophilia A. In particular, the ceDNA vector may comprise a desired FVIII protein sequence operably linked to control elements capable of directing transcription of the desired FVIII protein encoded by the exogenous DNA sequence when introduced into the subject. The ceDNA vector can be administered via any suitable route as provided above, and elsewhere herein.

[0416] The compositions and vectors provided herein can be used to deliver an FVIII protein for various purposes. In some embodiments, the transgene encodes an FVIII protein that is intended to be used for research purposes, e.g., to create a somatic transgenic animal model harboring the transgene, e.g., to study the function of the FVIII protein product. In another example, the transgene encodes an FVIII protein that is intended to be used to create an animal model of hemophilia A. In some embodiments, the encoded FVIII protein is useful for the treatment or prevention of hemophilia A states in a mammalian subject. The FVIII protein can be transferred (e.g., expressed in) to a patient in a sufficient amount to treat hemophilia A associated with reduced expression, lack of expression or dysfunction of the gene.

[0417] In principle, the expression cassette can include a nucleic acid or any transgene that encodes an FVIII protein that is either reduced or absent due to a mutation or which conveys a therapeutic benefit when overexpressed is considered to be within the scope of the invention. Preferably, noninserted bacterial DNA is not present and preferably no bacterial DNA is present in the ceDNA compositions provided herein.

[0418] A ceDNA vector is not limited to one species of ceDNA vector. As such, in another aspect, multiple ceDNA vectors expressing different proteins or the same FVIII protein but operatively linked to different promoters or cis-regulatory elements can be delivered simultaneously or sequentially to the target cell, tissue, organ, or subject. Therefore, this strategy can allow for the gene therapy or gene delivery of multiple proteins simultaneously. It is also possible to separate different portions of a FVIII protein into separate ceDNA vectors (e.g., different domains and/or co-factors required for functionality of a FVIII protein) which can be administered simultaneously or at different times, and can be separately regulatable, thereby adding an additional level of control of expression of a FVIII protein. Delivery can also be performed multiple times and, importantly for gene therapy in the clinical setting, in subsequent increasing or decreasing doses, given the lack of an anti-capsid host immune response due to the absence of a viral capsid. It is anticipated that no anti-capsid response will occur as there is no capsid.

[0419] The invention also provides for a method of treating hemophilia A in a subject comprising introducing into a target cell in need thereof (in particular a muscle cell or tissue) of the subject a therapeutically effective amount of a ceDNA vector as disclosed herein, optionally with a pharmaceutically acceptable carrier. While the ceDNA vector can be introduced in the presence of a carrier, such a carrier is not required. The ceDNA vector implemented comprises a nucleotide sequence of interest useful for treating the hemophilia A. In particular, the ceDNA vector may comprise a desired exogenous DNA sequence operably linked to control elements capable of directing transcription of the desired polypeptide, protein, or oligonucleotide encoded by the exogenous DNA sequence when introduced into the subject. The ceDNA vector can be administered via any suitable route as provided above, and elsewhere herein.

### IX. Methods of Delivering ceDNA Vectors for FVIII Protein Production

[0420] In some embodiments, a ceDNA vector for expression of FVIII protein can be delivered to a target cell in vitro or in vivo by various suitable methods. ceDNA vectors alone can be applied or injected. CeDNA vectors can be delivered to a cell without the help of a transfection reagent or other physical means. Alternatively, ceDNA vectors for expression of FVIII protein can be delivered using any art-known transfection reagent or other art-known physical means that facilitates entry of DNA into a cell, e.g., liposomes, alcohols, polylysine-rich compounds, arginine-rich compounds, calcium phosphate, microvesicles, microinjection, electroporation and the like.

[0421] The ceDNA vectors for expression of FVIII protein as disclosed herein can efficiently target cell and tissue-types that are normally difficult to transduce with conventional AAV virions using various delivery reagent.

[0422] One aspect of the technology described herein relates to a method of delivering an FVIII protein to a cell. Typically, for in vivo and in vitro methods, a ceDNA vector for expression of FVIII protein as disclosed herein may be introduced into the cell using the methods as disclosed herein, as well as other methods known in the art. A ceDNA vector for expression of FVIII protein as disclosed herein are preferably administered to the cell in a biologically-effective amount. If the ceDNA vector is administered to a cell in vivo (e.g., to a subject), a biologically-effective amount of the ceDNA vector is an amount that is sufficient to result in transduction and expression of the FVIII protein in a target cell.

[0423] Exemplary modes of administration of a ceDNA vector for expression of FVIII protein as disclosed herein includes oral, rectal, transmucosal, intranasal, inhalation (e.g., via an aerosol), buccal (e.g., sublingual), vaginal, intrathecal, intraocular, transdermal, intraendothelial, in utero (or in ovo), parenteral (e.g., intravenous, subcutaneous, intradermal, intracranial, intramuscular [including administration to skeletal, diaphragm and/or cardiac muscle], intrapleural, intracerebral, and intraarticular). Administration can be systemically or direct delivery to the liver or elsewhere (e.g., any kidneys, gallbladder, prostate, adrenal gland, heart, intestine, lung, and stomach).

[0424] Administration can be topical (e.g., to both skin and mucosal surfaces, including airway surfaces, and transdermal administration), intralymphatic, and the like, as well as direct tissue or organ injection (e.g., but not limited to, liver, but also to eye, muscles, including skeletal muscle, cardiac muscle, diaphragm muscle, or brain).

[0425] Administration of the ceDNA vector can be to any site in a subject, including, without limitation, a site selected from the group consisting of the liver and/or also eyes, brain, a skeletal muscle, a smooth muscle, the heart, the diaphragm, the airway epithelium, the kidney, the spleen, the pancreas, the skin.

[0426] The most suitable route in any given case will depend on the nature and severity of the condition being treated, ameliorated, and/or prevented and on the nature of the particular ceDNA vector that is being used. Additionally, ceDNA permits one to administer more than one FVIII protein in a single vector, or multiple ceDNA vectors (e.g. a ceDNA cocktail).

A. Intramuscular Administration of a ceDNA Vector

[0427] In some embodiments, a method of treating a disease in a subject comprises introducing into a target cell in need thereof (in particular a muscle cell or tissue) of the subject a therapeutically effective amount of a ceDNA vector encoding an FVIII protein, optionally with a pharmaceutically acceptable carrier. In some embodiments, the ceDNA vector for expression of FVIII protein is administered to a muscle tissue of a subject.

[0428] In some embodiments, administration of the ceDNA vector can be to any site in a subject, including, without limitation, a site selected from the group consisting of a skeletal muscle, a smooth muscle, the heart, the diaphragm, or muscles of the eye.

[0429] Administration of a ceDNA vector for expression of FVIII protein as disclosed herein to a skeletal muscle according to the present invention includes but is not limited to administration to the skeletal muscle in the limbs (e.g., upper arm, lower arm, upper leg, and/or lower leg), back, neck, head (e.g., tongue), thorax, abdomen, pelvis/perineum, and/or digits. The ceDNA as disclosed herein vector can be delivered to skeletal muscle by intravenous administration, intra-arterial administration, intraperitoneal administration, limb perfusion, (optionally, isolated limb perfusion of a leg and/or arm; see, e.g. Arruda et al., (2005) Blood 105: 3458-3464), and/or direct intramuscular injection. In particular embodiments, the ceDNA vector as disclosed herein is administered to the liver, eye, a limb (arm and/or leg) of a subject (e.g., a subject with muscular dystrophy such as DMD) by limb perfusion, optionally isolated limb perfusion (e.g., by intravenous or intra-articular administration. In embodiments, the ceDNA vector as disclosed herein can be administered without employing “hydrodynamic” techniques.

[0430] For instance, tissue delivery (e.g., to retina) of conventional viral vectors is often enhanced by hydrodynamic techniques (e.g., intravenous/intravenous administration in a large volume), which increase pressure in the vasculature and facilitate the ability of the viral vector to cross the endothelial cell barrier. In particular embodiments, the ceDNA vectors described herein can be administered in the absence of hydrodynamic techniques such as high volume infusions and/or elevated intravascular pressure (e.g., greater than normal systolic pressure, for example, less than or equal to a 5%, 10%, 15%, 20%, 25% increase in intravascular pressure over normal systolic pressure). Such methods may reduce or avoid the side effects associated with hydrodynamic techniques such as edema, nerve damage and/or compartment syndrome.

[0431] Furthermore, a composition comprising a ceDNA vector for expression of FVIII protein as disclosed herein that is administered to a skeletal muscle can be administered to a skeletal muscle in the limbs (e.g., upper arm, lower arm, upper leg, and/or lower leg), back, neck, head (e.g., tongue), thorax, abdomen, pelvis/perineum, and/or digits. Suitable skeletal muscles include but are not limited to abductor digiti minimi (in the hand), abductor digiti minimi (in the foot), abductor hallucis, abductor ossis metatarsi quinti, abductor pollicis brevis, abductor pollicis longus, adductor brevis, adductor hallucis, adductor longus, adductor magnus, adductor pollicis, anconeus, anterior scalene, articularis genus, biceps brachii, biceps femoris, brachialis, brachioradialis, buccinator, coracobrachialis, corrugator supercilii, deltoid, depressor anguli oris, depressor labii inferioris, digastric, dorsal interossei (in the hand), dorsal interossei (in the foot), extensor carpi radialis brevis, extensor carpi radialis longus, extensor carpi ulnaris, extensor digiti minimi, extensor digitorum, extensor digitorum brevis, extensor digitorum longus, extensor hallucis brevis, extensor hallucis longus, extensor indicis, extensor pollicis brevis, extensor pollicis longus, flexor carpi radialis, flexor carpi ulnaris, flexor digiti minimi brevis (in the hand), flexor digiti minimi brevis (in the foot), flexor digitorum brevis, flexor digitorum longus, flexor digitorum profundus, flexor digitorum superficialis, flexor hallucis brevis, flexor hallucis longus, flexor pollicis brevis, flexor pollicis longus, frontalis, gastrocnemius, geniohyoid, gluteus maximus, gluteus medius, gluteus minimus, gracilis, iliocostalis cervicis, iliocostalis lumborum, iliocostalis thoracis, illiacus, inferior gemellus, inferior oblique, inferior rectus, infraspinatus, interspinalis, intertransversi, lateral pterygoid, lateral rectus, latissimus dorsi, levator anguli oris, levator labii superioris, levator labii superioris alaeque nasi, levator palpebrae superioris, levator scapulae, long rotators, longissimus capitis, longissimus cervicis, longissimus thoracis, longus capitis, longus colli, lumbricals (in the hand), lumbricals (in the foot), masseter, medial pterygoid, medial rectus, middle scalene, multifidus, mylohyoid, obliquus capitis inferior, obliquus capitis superior, obturator externus, obturator internus, occipitalis, omohyoid, opponens digiti minimi, opponens pollicis, orbicularis oculi, orbicularis oris, palmar interossei, palmaris brevis, palmaris longus, pectineus, pectoralis major, pectoralis minor, peroneus brevis, peroneus longus, peroneus tertius, piriformis, plantar interossei, plantaris, platysma, popliteus, posterior scalene, pronator quadratus, pronator teres, psoas major, quadratus femoris, quadratus plantae, rectus capitis anterior, rectus capitis lateralis, rectus capitis posterior major, rectus capitis posterior minor, rectus femoris, rhomboid major, rhomboid minor, risorius, sartorius, scalenus minimus, semimembranosus, semispinalis capitis, semispinalis cervicis, semispinalis thoracis, semitendinosus, serratus anterior, short rotators, soleus, spinalis capitis, spinalis cervicis, spinalis thoracis, splenius capitis, splenius cervicis, sternocleidomastoid, stemohyoid, stemothyroid, stylohyoid, subclavius, subscapularis, superior gemellus, superior oblique, superior rectus, supinator, supraspinatus, temporalis, tensor fascia lata, teres major, teres minor, thoracis, thyrohyoid, tibialis anterior, tibialis posterior, trapezius, triceps brachii, vastus intermedius, vastus lateralis, vastus medialis, zygomaticus major, and zygomaticus minor, and any other suitable skeletal muscle as known in the art.

[0432] Administration of a ceDNA vector for expression of FVIII protein as disclosed herein to diaphragm muscle can be by any suitable method including intravenous administration, intra-arterial administration, and/or intra-peritoneal administration. In some embodiments, delivery of an expressed transgene from the ceDNA vector to a target tissue can also be achieved by delivering a synthetic depot comprising the ceDNA vector, where a depot comprising the ceDNA vector is implanted into skeletal, smooth, cardiac and/or diaphragm muscle tissue or the muscle tissue can be contacted with a film or other matrix comprising the ceDNA vector as described herein. Such implantable matrices or substrates are described in U.S. Pat. No. 7,201,898.

[0433] Administration of a ceDNA vector for expression of FVIII protein as disclosed herein to cardiac muscle includes administration to the left atrium, right atrium, left ventricle, right ventricle and/or septum. The ceDNA vector as described herein can be delivered to cardiac muscle by intravenous administration, intra-arterial administration such as intra-aortic administration, direct cardiac injection (e.g., into left atrium, right atrium, left ventricle, right ventricle), and/or coronary artery perfusion.

[0434] Administration of a ceDNA vector for expression of FVIII protein as disclosed herein to smooth muscle can be by any suitable method including intravenous administration, intra-arterial administration, and/or intra-peritoneal administration. In one embodiment, administration can be to endothelial cells present in, near, and/or on smooth muscle. Non-limiting examples of smooth muscles include the iris of the eye, bronchioles of the lung, laryngeal muscles (vocal cords), muscular layers of the stomach, esophagus, small and large intestine of the gastrointestinal tract, ureter, detrusor muscle of the urinary bladder, uterine myometrium, penis, or prostate gland.

[0435] In some embodiments, of a ceDNA vector for expression of FVIII protein as disclosed herein is administered to skeletal muscle, diaphragm muscle and/or cardiac muscle. In representative embodiments, a ceDNA vector according to the present invention is used to treat and/or prevent disorders of skeletal, cardiac and/or diaphragm muscle.

[0436] Specifically, it is contemplated that a composition comprising a ceDNA vector for expression of FVIII protein as disclosed herein can be delivered to one or more muscles of the eye (e.g., Lateral rectus, Medial rectus, Superior rectus, Inferior rectus, Superior oblique, Inferior oblique), facial muscles (e.g., Occipitofrontalis muscle, Temporoparietalis muscle, Procerus muscle, Nasalis muscle, Depressor septi nasi muscle, Orbicularis oculi muscle, Corrugator supercilii muscle, Depressor supercilii muscle, Auricular muscles, Orbicularis oris muscle, Depressor anguli oris muscle, Risorius, Zygomaticus major muscle, Zygomaticus minor muscle, Levator labii superioris, Levator labii superioris alaeque nasi muscle, Depressor labii inferioris muscle, Levator anguli oris, Buccinator muscle, Mentalis) or tongue muscles (e.g., genioglossus, hyoglossus, chondroglossus, styloglossus, palatoglossus, superior longitudinal muscle, inferior longitudinal muscle, the vertical muscle, and the transverse muscle).
[0437] (i) Intramuscular injection: In some embodiments, a composition comprising a ceDNA vector for expression of FVIII protein as disclosed herein can be injected into one or more sites of a given muscle, for example, skeletal muscle (e.g., deltoid, vastus lateralis, ventrogluteal muscle of dorsogluteal muscle, or anterolateral thigh for infants) in a subject using a needle. The composition comprising ceDNA can be introduced to other subtypes of muscle cells. Non-limiting examples of muscle cell subtypes include skeletal muscle cells, cardiac muscle cells, smooth muscle cells and/or diaphragm muscle cells.

[0438] Methods for intramuscular injection are known to those of skill in the art and as such are not described in detail herein. However, when performing an intramuscular injection, an appropriate needle size should be determined based on the age and size of the patient, the viscosity of the composition, as well as the site of injection. Table 8 provides guidelines for exemplary sites of injection and corresponding needle size:

TABLE 8
Guidelines for intramuscular injection in human patients

| | | | Maximum |
|---|---|---|---|
| Injection | Needle | Needle | volume of |
| Site | Gauge | Size | composition |
| Ventrogluteal | Aqueous | Thin adult: | 3 mL |
| site | solutions: | 15 to 25 mm | |
| (gluteus | 20-25 gauge | Average adult: | |
| medius | Viscous or oil- | 25 mm | |
| and gluteus | based solution: | Larger adult | |
| minimus) | 18-21 gauge | (over 150 lbs): | |
| | | 25 to 38 mm. | |
| | | Children and infants: | |
| | | will require | |
| | | a smaller needle | |
| Vastus | Aqueous | Adult: | 3 mL |
| lateralis | solutions: | 25 mm to 38 mm | |
| | 20-25 gauge | | |
| | Viscous or oil- | | |
| | based solution: | | |
| | 18-21 gauge | | |
| | Children/infants: | | |
| | 22 to 25 gauge | | |
| Deltoid | 22 to 25 gauge | Males: | 1 mL |
| | | 130-260 lbs: 25 mm | |
| | | Females: | |
| | | <130 lbs: 16 mm | |
| | | 130-200 lbs: 25 mm | |
| | | >2001bs: 38 mm | |

[0439] In certain embodiments, a ceDNA vector for expression of FVIII protein as disclosed herein is formulated in a small volume, for example, an exemplary volume as outlined in Table 8 for a given subject. In some embodiments, the subject can be administered a general or local anesthetic prior to the injection, if desired. This is particularly desirable if multiple injections are required or if a deeper muscle is injected, rather than the common injection sites noted above.

[0440] In some embodiments, intramuscular injection can be combined with electroporation, delivery pressure or the use of transfection reagents to enhance cellular uptake of the ceDNA vector.
[0441] (ii) Transfection Reagents: In some embodiments, a ceDNA vector for expression of FVIII protein as disclosed herein is formulated in compositions comprising one or more transfection reagents to facilitate uptake of the vectors into myotubes or muscle tissue. Thus, in one embodiment, the nucleic acids described herein are administered to a muscle cell, myotube or muscle tissue by transfection using methods described elsewhere herein.
[0442] (iii) Electroporation: In certain embodiments, a ceDNA vector for expression of FVIII protein as disclosed herein is administered in the absence of a carrier to facilitate entry of ceDNA into the cells, or in a physiologically inert pharmaceutically acceptable carrier (i.e., any carrier that does not improve or enhance uptake of the capsid free, non-viral vectors into the myotubes). In such embodiments, the uptake of the capsid free, non-viral vector can be facilitated by electroporation of the cell or tissue.

[0443] Cell membranes naturally resist the passage of extracellular into the cell cytoplasm. One method for temporarily reducing this resistance is “electroporation”, where electrical fields are used to create pores in cells without causing permanent damage to the cells. These pores are large enough to allow DNA vectors, pharmaceutical drugs, DNA, and other polar compounds to gain access to the interior of the cell. With time, the pores in the cell membrane close and the cell once again becomes impermeable.

[0444] Electroporation can be used in both in vitro and in vivo applications to introduce e.g., exogenous DNA into living cells. In vitro applications typically mix a sample of live cells with the composition comprising e.g., DNA. The cells are then placed between electrodes such as parallel plates and an electrical field is applied to the cell/composition mixture.

[0445] There are a number of methods for in vivo electroporation; electrodes can be provided in various configurations such as, for example, a caliper that grips the epidermis overlying a region of cells to be treated. Alternatively, needle-shaped electrodes may be inserted into the tissue, to access more deeply located cells. In either case, after the composition comprising e.g., nucleic acids are injected into the treatment region, the electrodes apply an electrical field to the region. In some electroporation applications, this electric field comprises a single square wave pulse on the order of 100 to 500 V/cm. of about 10 to 60 ms duration. Such a pulse may be generated, for example, in known applications of the Electro Square Porator T820, made by the BTX Division of Genetronics, Inc.

[0446] Typically, successful uptake of e.g., nucleic acids occurs only if the muscle is electrically stimulated immediately, or shortly after administration of the composition, for example, by injection into the muscle.

[0447] In certain embodiments, electroporation is achieved using pulses of electric fields or using low voltage/long pulse treatment regimens (e.g., using a square wave pulse electroporation system). Exemplary pulse generators capable of generating a pulsed electric field include, for example, the ECM600, which can generate an exponential wave form, and the ElectroSquarePorator (T820), which can generate a square wave form, both of which are available from BTX, a division of Genetronics, Inc. (San Diego, Calif.). Square wave electroporation systems deliver controlled electric pulses that rise quickly to a set voltage, stay at that level for a set length of time (pulse length), and then quickly drop to zero.

[0448] In some embodiments, a local anesthetic is administered, for example, by injection at the site of treatment to reduce pain that may be associated with electroporation of the tissue in the presence of a composition comprising a capsid free, non-viral vector as described herein. In addition, one of skill in the art will appreciate that a dose of the composition should be chosen that minimizes and/or prevents excessive tissue damage resulting in fibrosis, necrosis or inflammation of the muscle.
[0449] (iv) Delivery Pressure: In some embodiments, delivery of a ceDNA vector for expression of FVIII protein as disclosed herein to muscle tissue is facilitated by delivery pressure, which uses a combination of large volumes and rapid injection into an artery supplying a limb (e.g., iliac artery). This mode of administration can be achieved through a variety of methods that involve infusing limb vasculature with a composition comprising a ceDNA vector, typically while the muscle is isolated from the systemic circulation using a tourniquet of vessel clamps. In one method, the composition is circulated through the limb vasculature to permit extravasation into the cells. In another method, the intravascular hydrodynamic pressure is increased to expand vascular beds and increase uptake of the ceDNA vector into the muscle cells or tissue. In one embodiment, the ceDNA composition is administered into an artery.
[0450] (v) Lipid Nanoparticle Compositions: In some embodiments, a ceDNA vector for expression of FVIII protein as disclosed herein for intramuscular delivery are formulated in a composition comprising a liposome as described elsewhere herein.
[0451] (vi) Systemic Administration of a ceDNA Vector targeted to Muscle Tissue: In some embodiments, a ceDNA vector for expression of FVIII protein as disclosed herein is formulated to be targeted to the muscle via indirect delivery administration, where the ceDNA is transported to the muscle as opposed to the liver. Accordingly, the technology described herein encompasses indirect administration of compositions comprising a ceDNA vector for expression of FVIII protein as disclosed herein to muscle tissue, for example, by systemic administration. Such compositions can be administered topically, intravenously (by bolus or continuous infusion), intracellular injection, intratissue injection, orally, by inhalation, intraperitoneally, subcutaneously, intracavity, and can be delivered by peristaltic means, if desired, or by other means known by those skilled in the art. The agent can be administered systemically, for example, by intravenous infusion, if so desired.

[0452] In some embodiments, uptake of a ceDNA vector for expression of FVIII protein as disclosed herein into muscle cells/tissue is increased by using a targeting agent or moiety that preferentially directs the vector to muscle tissue. Thus, in some embodiments, a capsid free, ceDNA vector can be concentrated in muscle tissue as compared to the amount of capsid free ceDNA vectors present in other cells or tissues of the body.

[0453] In some embodiments, the composition comprising a ceDNA vector for expression of FVIII protein as disclosed herein further comprises a targeting moiety to muscle cells. In other embodiments, the expressed gene product comprises a targeting moiety specific to the tissue in which it is desired to act. The targeting moiety can include any molecule, or complex of molecules, which is/are capable of targeting, interacting with, coupling with, and/or binding to an intracellular, cell surface, or extracellular biomarker of a cell or tissue. The biomarker can include, for example, a cellular protease, a kinase, a protein, a cell surface receptor, a lipid, and/or fatty acid. Other examples of biomarkers that the targeting moieties can target, interact with, couple with, and/or bind to include molecules associated with a particular disease. For example, the biomarkers can include cell surface receptors implicated in cancer development, such as epidermal growth factor receptor and transferrin receptor. The targeting moieties can include, but are not limited to, synthetic compounds, natural compounds or products, macromolecular entities, bioengineered molecules (e.g., polypeptides, lipids, polynucleotides, antibodies, antibody fragments), and small entities (e.g., small molecules, neurotransmitters, substrates, ligands, hormones and elemental compounds) that bind to molecules expressed in the target muscle tissue.

[0454] In certain embodiments, the targeting moiety may further comprise a receptor molecule, including, for example, receptors, which naturally recognize a specific desired molecule of a target cell. Such receptor molecules include receptors that have been modified to increase their specificity of interaction with a target molecule, receptors that have been modified to interact with a desired target molecule not naturally recognized by the receptor, and fragments of such receptors (see, e.g., Skerra, 2000, J. Molecular Recognition, 13:167-187). A preferred receptor is a chemokine receptor. Exemplary chemokine receptors have been described in, for example, Lapidot et al, 2002, Exp Hematol, 30:973-81 and Onuffer et al., 2002, Trends Pharmacol Sci, 23:459-67.

[0455] In other embodiments, the additional targeting moiety may comprise a ligand molecule, including, for example, ligands which naturally recognize a specific desired receptor of a target cell, such as a Transferrin (Tf) ligand. Such ligand molecules include ligands that have been modified to increase their specificity of interaction with a target receptor, ligands that have been modified to interact with a desired receptor not naturally recognized by the ligand, and fragments of such ligands.

[0456] In still other embodiments, the targeting moiety may comprise an aptamer. Aptamers are oligonucleotides that are selected to bind specifically to a desired molecular structure of the target cell. Aptamers typically are the products of an affinity selection process similar to the affinity selection of phage display (also known as in vitro molecular evolution). The process involves performing several tandem iterations of affinity separation, e.g., using a solid support to which the diseased immunogen is bound, followed by polymerase chain reaction (PCR) to amplify nucleic acids that bound to the immunogens. Each round of affinity separation thus enriches the nucleic acid population for molecules that successfully bind the desired immunogen. In this manner, a random pool of nucleic acids may be “educated” to yield aptamers that specifically bind target molecules. Aptamers typically are RNA, but may be DNA or analogs or derivatives thereof, such as, without limitation, peptide nucleic acids (PNAs) and phosphorothioate nucleic acids.

[0457] In some embodiments, the targeting moiety can comprise a photo-degradable ligand (i.e., a ‘caged’ ligand) that is released, for example, from a focused beam of light such that the capsid free, non-viral vectors or the gene product are targeted to a specific tissue.

[0458] It is also contemplated herein that the compositions be delivered to multiple sites in one or more muscles of the subject. That is, injections can be in at least 2, at least 3, at least 4, at least 5, at least 6, at least 7, at least 8, at least 9, at least 10, at least 15, at least 20, at least 25, at least 30, at least 35, at least 40, at least 45, at least 50, at least 55, at least 60, at least 65, at least 70, at least 75, at least 80, at least 85, at least 90, at least 95, at least 100 injections sites. Such sites can be spread over the area of a single muscle or can be distributed among multiple muscles.

B. Administration of the ceDNA Vector for Expression of FVIII Protein to Non-Muscle Locations

[0459] In another embodiment, a ceDNA vector for expression of FVIII protein is administered to the liver. The ceDNA vector may also be administered to different regions of the eye such as the cornea and/or optic nerve The ceDNA vector may also be introduced into the spinal cord, brainstem (medulla oblongata, pons), midbrain (hypothalamus, thalamus, epithalamus, pituitary gland, substantia nigra, pineal gland), cerebellum, telencephalon (corpus striatum, cerebrum including the occipital, temporal, parietal and frontal lobes, cortex, basal ganglia, hippocampus and portaamygdala), limbic system, neocortex, corpus striatum, cerebrum, and inferior colliculus. The ceDNA vector may be delivered into the cerebrospinal fluid (e.g., by lumbar puncture). The ceDNA vector for expression of FVIII protein may further be administered intravascularly to the CNS in situations in which the blood-brain barrier has been perturbed (e.g., brain tumor or cerebral infarct).

[0460] In some embodiments, the ceDNA vector for expression of FVIII protein can be administered to the desired region(s) of the eye by any route known in the art, including but not limited to, intrathecal, intra-ocular, intracerebral, intraventricular, intravenous (e.g., in the presence of a sugar such as mannitol), intranasal, intra-aural, intra-ocular (e.g., intra-vitreous, sub-retinal, anterior chamber) and peri-ocular (e.g., sub-Tenon's region) delivery as well as intramuscular delivery with retrograde delivery to motor neurons.

[0461] In some embodiments, the ceDNA vector for expression of FVIII protein is administered in a liquid formulation by direct injection (e.g., stereotactic injection) to the desired region or compartment in the CNS. In other embodiments, the ceDNA vector can be provided by topical application to the desired region or by intra-nasal administration of an aerosol formulation. Administration to the eye may be by topical application of liquid droplets. As a further alternative, the ceDNA vector can be administered as a solid, slow-release formulation (see, e.g., U.S. Pat. No. 7,201,898). In yet additional embodiments, the ceDNA vector can used for retrograde transport to treat, ameliorate, and/or prevent diseases and disorders involving motor neurons (e.g., amyotrophic lateral sclerosis (ALS); spinal muscular atrophy (SMA), etc.). For example, the ceDNA vector can be delivered to muscle tissue from which it can migrate into neurons.

### C. Ex Vivo Treatment

[0462] In some embodiments, cells are removed from a subject, a ceDNA vector for expression of FVIII protein as disclosed herein is introduced therein, and the cells are then replaced back into the subject. Methods of removing cells from subject for treatment ex vivo, followed by introduction back into the subject are known in the art (see, e.g., U.S. Pat. No. 5,399,346; the disclosure of which is incorporated herein in its entirety). Alternatively, a ceDNA vector is introduced into cells from another subject, into cultured cells, or into cells from any other suitable source, and the cells are administered to a subject in need thereof.

[0463] Cells transduced with a ceDNA vector for expression of FVIII protein as disclosed herein are preferably administered to the subject in a “therapeutically-effective amount” in combination with a pharmaceutical carrier. Those skilled in the art will appreciate that the therapeutic effects need not be complete or curative, as long as some benefit is provided to the subject.

[0464] In some embodiments, a ceDNA vector for expression of FVIII protein as disclosed herein can encode an FVIII protein as described herein (sometimes called a transgene or heterologous nucleotide sequence) that is to be produced in a cell in vitro, ex vivo, or in vivo. For example, in contrast to the use of the ceDNA vectors described herein in a method of treatment as discussed herein, in some embodiments a ceDNA vector for expression of FVIII protein may be introduced into cultured cells and the expressed FVIII protein isolated from the cells, e.g., for the production of antibodies and fusion proteins. In some embodiments, the cultured cells comprising a ceDNA vector for expression of FVIII protein as disclosed herein can be used for commercial production of antibodies or fusion proteins, e.g., serving as a cell source for small or large scale biomanufacturing of antibodies or fusion proteins. In alternative embodiments, a ceDNA vector for expression of FVIII protein as disclosed herein is introduced into cells in a host non-human subject, for in vivo production of antibodies or fusion proteins, including small scale production as well as for commercial large scale FVIII protein production.

[0465] The ceDNA vectors for expression of FVIII protein as disclosed herein can be used in both veterinary and medical applications. Suitable subjects for ex vivo gene delivery methods as described above include both avians (e.g., chickens, ducks, geese, quail, turkeys and pheasants) and mammals (e.g., humans, bovines, ovines, caprines, equines, felines, canines, and lagomorphs), with mammals being preferred. Human subjects are most preferred. Human subjects include neonates, infants, juveniles, and adults.

### D. Dose Ranges

[0466] Provided herein are methods of treatment comprising administering to the subject an effective amount of a composition comprising a ceDNA vector encoding an FVIII protein as described herein. As will be appreciated by a skilled practitioner, the term “effective amount” refers to the amount of the ceDNA composition administered that results in expression of the FVIII protein in a “therapeutically effective amount” for the treatment of hemophilia A.

[0467] In vivo and/or in vitro assays can optionally be employed to help identify optimal dosage ranges for use. The precise dose to be employed in the formulation will also depend on the route of administration, and the seriousness of the condition, and should be decided according to the judgment of the person of ordinary skill in the art and each subject's circumstances. Effective doses can be extrapolated from dose-response curves derived from in vitro or animal model test systems.

[0468] A ceDNA vectors for expression of FVIII protein as disclosed herein is administered in sufficient amounts to transfect the cells of a desired tissue and to provide sufficient levels of gene transfer and expression without undue adverse effects. Conventional and pharmaceutically acceptable routes of administration include, but are not limited to, those described above in the “Administration” section, such as direct delivery to the selected organ (e.g., intraportal delivery to the liver), oral, inhalation (including intranasal and intratracheal delivery), intraocular, intravenous, intramuscular, subcutaneous, intradermal, intratumoral, and other parental routes of administration. Routes of administration can be combined, if desired.

[0469] The dose of the amount of a ceDNA vectors for expression of FVIII protein as disclosed herein required to achieve a particular “therapeutic effect,” will vary based on several factors including, but not limited to: the route of nucleic acid administration, the level of gene or RNA expression required to achieve a therapeutic effect, the specific disease or disorder being treated, and the stability of the gene(s), RNA product(s), or resulting expressed protein(s). One of skill in the art can readily determine a ceDNA vector dose range to treat a patient having a particular disease or disorder based on the aforementioned factors, as well as other factors that are well known in the art.

[0470] Dosage regime can be adjusted to provide the optimum therapeutic response. For example, the oligonucleotide can be repeatedly administered, e.g., several doses can be administered daily, or the dose can be proportionally reduced as indicated by the exigencies of the therapeutic situation. One of ordinary skill in the art will readily be able to determine appropriate doses and schedules of administration of the subject oligonucleotides, whether the oligonucleotides are to be administered to cells or to subjects.

[0471] A “therapeutically effective dose” will fall in a relatively broad range that can be determined through clinical trials and will depend on the particular application (neural cells will require very small amounts, while systemic injection would require large amounts). For example, for direct in vivo injection into skeletal or cardiac muscle of a human subject, a therapeutically effective dose will be on the order of from about 1 μg to 100 g of the ceDNA vector. If exosomes or microparticles are used to deliver the ceDNA vector, then a therapeutically effective dose can be determined experimentally, but is expected to deliver from 1 μg to about 100 g of vector. Moreover, a therapeutically effective dose is an amount ceDNA vector that expresses a sufficient amount of the transgene to have an effect on the subject that results in a reduction in one or more symptoms of the disease, but does not result in significant off-target or significant adverse side effects. In one embodiment, a “therapeutically effective amount” is an amount of an expressed FVIII protein that is sufficient to produce a statistically significant, measurable change in expression of hemophilia A biomarker or reduction of a given disease symptom. Such effective amounts can be gauged in clinical trials as well as animal studies for a given ceDNA vector composition.

[0472] Formulation of pharmaceutically acceptable excipients and carrier solutions is well-known to those of skill in the art, as is the development of suitable dosing and treatment regimens for using the particular compositions described herein in a variety of treatment regimens.

[0473] For in vitro transfection, an effective amount of a ceDNA vectors for expression of FVIII protein as disclosed herein to be delivered to cells (1×10⁶ cells) will be on the order of 0.1 to 100 μg ceDNA vector, preferably 1 to 20 μg, and more preferably 1 to 15 μg or 8 to 10 μg. Larger ceDNA vectors will require higher doses. If exosomes or microparticles are used, an effective in vitro dose can be determined experimentally but would be intended to deliver generally the same amount of the ceDNA vector.

[0474] For the treatment of hemophilia A, the appropriate dosage of a ceDNA vector that expresses an FVIII protein as disclosed herein will depend on the specific type of disease to be treated, the type of a FVIII protein, the severity and course of the hemophilia A disease, previous therapy, the patient's clinical history and response to the antibody, and the discretion of the attending physician. The ceDNA vector encoding a FVIII protein is suitably administered to the patient at one time or over a series of treatments. Various dosing schedules including, but not limited to, single or multiple administrations over various time-points, bolus administration, and pulse infusion are contemplated herein.

[0475] Depending on the type and severity of the disease, a ceDNA vector is administered in an amount that the encoded FVIII protein is expressed at about 0.3 mg/kg to 100 mg/kg (e.g. 15 mg/kg-100 mg/kg, or any dosage within that range), by one or more separate administrations, or by continuous infusion. One typical daily dosage of the ceDNA vector is sufficient to result in the expression of the encoded FVIII protein at a range from about 15 mg/kg to 100 mg/kg or more, depending on the factors mentioned above. One exemplary dose of the ceDNA vector is an amount sufficient to result in the expression of the encoded FVIII protein as disclosed herein in a range from about 10 mg/kg to about 50 mg/kg. Thus, one or more doses of a ceDNA vector in an amount sufficient to result in the expression of the encoded FVIII protein at about 0.5 mg/kg, 1 mg/kg, 1.5 mg/kg, 2.0 mg/kg, 3 mg/kg, 4.0 mg/kg, 5 mg/kg, 10 mg/kg, 15 mg/kg, 20 mg/kg, 25 mg/kg, 30 mg/kg, 35 mg/kg, 40 mg/kg, 50 mg/kg, 60 mg/kg, 70 mg/kg, 80 mg/kg, 90 mg/kg, or 100 mg/kg (or any combination thereof) may be administered to the patient. In some embodiments, the ceDNA vector is an amount sufficient to result in the expression of the encoded FVIII protein for a total dose in the range of 50 mg to 2500 mg. An exemplary dose of a ceDNA vector is an amount sufficient to result in the total expression of the encoded FVIII protein at about 50 mg, about 100 mg, 200 mg, 300 mg, 400 mg, about 500 mg, about 600 mg, about 700 mg, about 720 mg, about 1000 mg, about 1050 mg, about 1100 mg, about 1200 mg, about 1300 mg, about 1400 mg, about 1500 mg, about 1600 mg, about 1700 mg, about 1800 mg, about 1900 mg, about 2000 mg, about 2050 mg, about 2100 mg, about 2200 mg, about 2300 mg, about 2400 mg, or about 2500 mg (or any combination thereof). As the expression of the FVIII protein from ceDNA vector can be carefully controlled by regulatory switches herein, or alternatively multiple dose of the ceDNA vector administered to the subject, the expression of the FVIII protein from the ceDNA vector can be controlled in such a way that the doses of the expressed FVIII protein may be administered intermittently, e.g. every week, every two weeks, every three weeks, every four weeks, every month, every two months, every three months, or every six months from the ceDNA vector. The progress of this therapy can be monitored by conventional techniques and assays.

[0476] In certain embodiments, a ceDNA vector is administered an amount sufficient to result in the expression of the encoded FVIII protein at a dose of 15 mg/kg, 30 mg/kg, 40 mg/kg, 45 mg/kg, 50 mg/kg, 60 mg/kg or a flat dose, e.g., 300 mg, 500 mg, 700 mg, 800 mg, or higher. In some embodiments, the expression of the FVIII protein from the ceDNA vector is controlled such that the FVIII protein is expressed every day, every other day, every week, every 2 weeks or every 4 weeks for a period of time. In some embodiments, the expression of the FVIII protein from the ceDNA vector is controlled such that the FVIII protein is expressed every 2 weeks or every 4 weeks for a period of time. In certain embodiments, the period of time is 6 months, one year, eighteen months, two years, five years, ten years, 15 years, 20 years, or the lifetime of the patient.

[0477] Treatment can involve administration of a single dose or multiple doses. In some embodiments, more than one dose can be administered to a subject; in fact, multiple doses can be administered as needed, because the ceDNA vector elicits does not elicit an anti-capsid host immune response due to the absence of a viral capsid. As such, one of skill in the art can readily determine an appropriate number of doses. The number of doses administered can, for example, be on the order of 1-100, preferably 2-20 doses.

[0478] Without wishing to be bound by any particular theory, the lack of typical anti-viral immune response elicited by administration of a ceDNA vector as described by the disclosure (i.e., the absence of capsid components) allows the ceDNA vector for expression of FVIII protein to be administered to a host on multiple occasions. In some embodiments, the number of occasions in which a heterologous nucleic acid is delivered to a subject is in a range of 2 to 10 times (e.g., 2, 3, 4, 5, 6, 7, 8, 9, or 10 times). In some embodiments, a ceDNA vector is delivered to a subject more than 10 times.

[0479] In some embodiments, a dose of a ceDNA vector for expression of FVIII protein as disclosed herein is administered to a subject no more than once per calendar day (e.g., a 24-hour period). In some embodiments, a dose of a ceDNA vector is administered to a subject no more than once per 2, 3, 4, 5, 6, or 7 calendar days. In some embodiments, a dose of a ceDNA vector for expression of FVIII protein as disclosed herein is administered to a subject no more than once per calendar week (e.g., 7 calendar days). In some embodiments, a dose of a ceDNA vector is administered to a subject no more than bi-weekly (e.g., once in a two calendar week period). In some embodiments, a dose of a ceDNA vector is administered to a subject no more than once per calendar month (e.g., once in 30 calendar days). In some embodiments, a dose of a ceDNA vector is administered to a subject no more than once per six calendar months. In some embodiments, a dose of a ceDNA vector is administered to a subject no more than once per calendar year (e.g., 365 days or 366 days in a leap year).

[0480] In particular embodiments, more than one administration (e.g., two, three, four or more administrations) of a ceDNA vector for expression of FVIII protein as disclosed herein may be employed to achieve the desired level of gene expression over a period of various intervals, e.g., daily, weekly, monthly, yearly, etc.

[0481] In some embodiments, a therapeutic a FVIII protein encoded by a ceDNA vector as disclosed herein can be regulated by a regulatory switch, inducible or repressible promotor so that it is expressed in a subject for at least 1 hour, at least 2 hours, at least 5 hours, at least 10 hours, at least 12 hours, at least 18 hours, at least 24 hours, at least 36 hours, at least 48 hours, at least 72 hours, at least 1 week, at least 2 weeks, at least 1 month, at least 2 months, at least 6 months, at least 12 months/one year, at least 2 years, at least 5 years, at least 10 years, at least 15 years, at least 20 years, at least 30 years, at least 40 years, at least 50 years or more. In one embodiment, the expression can be achieved by repeated administration of the ceDNA vectors described herein at predetermined or desired intervals. Alternatively, a ceDNA vector for expression of FVIII protein as disclosed herein can further comprise components of a gene editing system (e.g., CRISPR/Cas, TALENs, zinc finger endonucleases etc.) to permit insertion of the one or more nucleic acid sequences encoding the FVIII protein for substantially permanent treatment or “curing” the disease. Such ceDNA vectors comprising gene editing components are disclosed in International Application PCT/US18/64242, and can include the 5′ and 3′ homology arms (e.g., SEQ ID NO: 151-154, or sequences with at least 40%, 50%, 60%, 70% or 80% homology thereto) for insertion of the nucleic acid encoding the a FVIII protein into safe harbor regions, such as, but not including albumin gene or CCR5 gene. By way of example, a ceDNA vector expressing a FVIII protein can comprise at least one genomic safe harbor (GSH)-specific homology arms for insertion of the FVIII transgene into a genomic safe harbor is disclosed in International Patent Application PCT/US2019/020225, filed on Mar. 1, 2019, which is incorporated herein in its entirety by reference.

[0482] The duration of treatment depends upon the subject's clinical progress and responsiveness to therapy. Continuous, relatively low maintenance doses are contemplated after an initial higher therapeutic dose.

### E. Unit Dosage Forms

[0483] In some embodiments, the pharmaceutical compositions comprising a ceDNA vector for expression of FVIII protein as disclosed herein can conveniently be presented in unit dosage form. A unit dosage form will typically be adapted to one or more specific routes of administration of the pharmaceutical composition. In some embodiments, the unit dosage form is adapted for droplets to be administered directly to the eye. In some embodiments, the unit dosage form is adapted for administration by inhalation. In some embodiments, the unit dosage form is adapted for administration by a vaporizer. In some embodiments, the unit dosage form is adapted for administration by a nebulizer. In some embodiments, the unit dosage form is adapted for administration by an aerosolizer. In some embodiments, the unit dosage form is adapted for oral administration, for buccal administration, or for sublingual administration. In some embodiments, the unit dosage form is adapted for intravenous, intramuscular, or subcutaneous administration. In some embodiments, the unit dosage form is adapted for subretinal injection, suprachoroidal injection or intravitreal injection.

[0484] In some embodiments, the unit dosage form is adapted for intrathecal or intracerebroventricular administration. In some embodiments, the pharmaceutical composition is formulated for topical administration. The amount of active ingredient which can be combined with a carrier material to produce a single dosage form will generally be that amount of the compound which produces a therapeutic effect.

### X. Methods of Treatment

[0485] The technology described herein also demonstrates methods for making, as well as methods of using the disclosed ceDNA vectors for expression of FVIII protein in a variety of ways, including, for example, ex vivo, ex situ, in vitro and in vivo applications, methodologies, diagnostic procedures, and/or gene therapy regimens.

[0486] In one embodiment, the expressed therapeutic FVIII protein expressed from a ceDNA vector as disclosed herein is functional for the treatment of disease. In a preferred embodiment, the therapeutic FVIII protein does not cause an immune system reaction, unless so desired.

[0487] Provided herein is a method of treating hemophilia A in a subject comprising introducing into a target cell in need thereof (for example, a muscle cell or tissue, or other affected cell type) of the subject a therapeutically effective amount of a ceDNA vector for expression of FVIII protein as disclosed herein, optionally with a pharmaceutically acceptable carrier. While the ceDNA vector can be introduced in the presence of a carrier, such a carrier is not required. The ceDNA vector implemented comprises a nucleotide sequence encoding an FVIII protein as described herein useful for treating the disease. In particular, a ceDNA vector for expression of FVIII protein as disclosed herein may comprise a desired FVIII protein DNA sequence operably linked to control elements capable of directing transcription of the desired FVIII protein encoded by the exogenous DNA sequence when introduced into the subject. The ceDNA vector for expression of FVIII protein as disclosed herein can be administered via any suitable route as provided above, and elsewhere herein.

[0488] Disclosed herein are ceDNA vector compositions and formulations for expression of FVIII protein as disclosed herein that include one or more of the ceDNA vectors of the present invention together with one or more pharmaceutically-acceptable buffers, diluents, or excipients. Such compositions may be included in one or more diagnostic or therapeutic kits, for diagnosing, preventing, treating or ameliorating one or more symptoms of hemophilia A. In one aspect the disease, injury, disorder, trauma or dysfunction is a human disease, injury, disorder, trauma or dysfunction.

[0489] Another aspect of the technology described herein provides a method for providing a subject in need thereof with a diagnostically- or therapeutically-effective amount of a ceDNA vector for expression of FVIII protein as disclosed herein, the method comprising providing to a cell, tissue or organ of a subject in need thereof, an amount of the ceDNA vector as disclosed herein; and for a time effective to enable expression of the FVIII protein from the ceDNA vector thereby providing the subject with a diagnostically- or a therapeutically-effective amount of the FVIII protein expressed by the ceDNA vector. In a further aspect, the subject is human.

[0490] Another aspect of the technology described herein provides a method for diagnosing, preventing, treating, or ameliorating at least one or more symptoms of hemophilia A, a disorder, a dysfunction, an injury, an abnormal condition, or trauma in a subject. In an overall and general sense, the method includes at least the step of administering to a subject in need thereof one or more of the disclosed ceDNA vector for FVIII protein production, in an amount and for a time sufficient to diagnose, prevent, treat or ameliorate the one or more symptoms of the disease, disorder, dysfunction, injury, abnormal condition, or trauma in the subject. In such an embodiment, the subject can be evaluated for efficacy of the FVIII protein, or alternatively, detection of the FVIII protein or tissue location (including cellular and subcellular location) of the FVIII protein in the subject. As such, the ceDNA vector for expression of FVIII protein as disclosed herein can be used as an in vivo diagnostic tool, e.g., for the detection of cancer or other indications. In a further aspect, the subject is human.

[0491] Another aspect is use of a ceDNA vector for expression of FVIII protein as disclosed herein as a tool for treating or reducing one or more symptoms of hemophilia A or disease states. There are a number of inherited diseases in which defective genes are known, and typically fall into two classes: deficiency states, usually of enzymes, which are generally inherited in a recessive manner, and unbalanced states, which may involve regulatory or structural proteins, and which are typically but not always inherited in a dominant manner. For unbalanced disease states, a ceDNA vector for expression of FVIII protein as disclosed herein can be used to create hemophilia A state in a model system, which could then be used in efforts to counteract the disease state. Thus, the ceDNA vector for expression of FVIII protein as disclosed herein permit the treatment of genetic diseases. As used herein, hemophilia A state is treated by partially or wholly remedying the deficiency or imbalance that causes the disease or makes it more severe.

### A. Host Cells

[0492] In some embodiments, a ceDNA vector for expression of FVIII protein as disclosed herein delivers the FVIII protein transgene into a subject host cell. In some embodiments, the cells are photoreceptor cells. In some embodiments, the cells are RPE cells. In some embodiments, the subject host cell is a human host cell, including, for example blood cells, stem cells, hematopoietic cells, CD34⁺ cells, liver cells, cancer cells, vascular cells, muscle cells, pancreatic cells, neural cells, ocular or retinal cells, epithelial or endothelial cells, dendritic cells, fibroblasts, or any other cell of mammalian origin, including, without limitation, hepatic (i.e., liver) cells, lung cells, cardiac cells, pancreatic cells, intestinal cells, diaphragmatic cells, renal (i.e., kidney) cells, neural cells, blood cells, bone marrow cells, or any one or more selected tissues of a subject for which gene therapy is contemplated. In one aspect, the subject host cell is a human host cell.

[0493] The present disclosure also relates to recombinant host cells as mentioned above, including a ceDNA vector for expression of FVIII protein as disclosed herein. Thus, one can use multiple host cells depending on the purpose as is obvious to the skilled artisan. A construct or a ceDNA vector for expression of FVIII protein as disclosed herein including donor sequence is introduced into a host cell so that the donor sequence is maintained as a chromosomal integrant as described earlier. The term host cell encompasses any progeny of a parent cell that is not identical to the parent cell due to mutations that occur during replication. The choice of a host cell will to a large extent depend upon the donor sequence and its source.

[0494] The host cell may also be a eukaryote, such as a mammalian, insect, plant, or fungal cell. In one embodiment, the host cell is a human cell (e.g., a primary cell, a stem cell, or an immortalized cell line). In some embodiments, the host cell can be administered a ceDNA vector for expression of FVIII protein as disclosed herein ex vivo and then delivered to the subject after the gene therapy event. A host cell can be any cell type, e.g., a somatic cell or a stem cell, an induced pluripotent stem cell, or a blood cell, e.g., T-cell or B-cell, or bone marrow cell. In certain embodiments, the host cell is an allogenic cell. For example, T-cell genome engineering is useful for cancer immunotherapies, disease modulation such as HIV therapy (e.g., receptor knock out, such as CXCR4 and CCR5) and immunodeficiency therapies. MHC receptors on B-cells can be targeted for immunotherapy. In some embodiments, gene modified host cells, e.g., bone marrow stem cells, e.g., CD34⁺ cells, or induced pluripotent stem cells can be transplanted back into a patient for expression of a therapeutic protein.

### B. Additional Diseases for Gene Therapy:

[0495] In general, a ceDNA vector for expression of FVIII protein as disclosed herein can be used to deliver any FVIII protein in accordance with the description above to treat, prevent, or ameliorate the symptoms associated with hemophilia A related to an aberrant protein expression or gene expression in a subject.

[0496] In some embodiments, a ceDNA vector for expression of FVIII protein as disclosed herein can be used to deliver an FVIII protein to skeletal, cardiac or diaphragm muscle, for production of an FVIII protein for secretion and circulation in the blood or for systemic delivery to other tissues to treat, ameliorate, and/or prevent hemophilia A.

[0497] The a ceDNA vector for expression of FVIII protein as disclosed herein can be administered to the lungs of a subject by any suitable means, optionally by administering an aerosol suspension of respirable particles comprising the ceDNA vectors, which the subject inhales. The respirable particles can be liquid or solid. Aerosols of liquid particles comprising the ceDNA vectors may be produced by any suitable means, such as with a pressure-driven aerosol nebulizer or an ultrasonic nebulizer, as is known to those of skill in the art. See, e.g., U.S. Pat. No. 4,501,729. Aerosols of solid particles comprising the ceDNA vectors may likewise be produced with any solid particulate medicament aerosol generator, by techniques known in the pharmaceutical art.

[0498] In some embodiments, a ceDNA vector for expression of FVIII protein as disclosed herein can be administered to tissues of the CNS (e.g., brain, eye).

[0499] Ocular disorders that may be treated, ameliorated, or prevented with a ceDNA vector for expression of FVIII protein as disclosed herein include ophthalmic disorders involving the retina, posterior tract, and optic nerve (e.g., retinitis pigmentosa, diabetic retinopathy and other retinal degenerative diseases, uveitis, age-related macular degeneration, glaucoma). Many ophthalmic diseases and disorders are associated with one or more of three types of indications: (1) angiogenesis, (2) inflammation, and (3) degeneration. In some embodiments, the ceDNA vector as disclosed herein can be employed to deliver anti-angiogenic factors; anti-inflammatory factors; factors that retard cell degeneration, promote cell sparing, or promote cell growth and combinations of the foregoing. Diabetic retinopathy, for example, is characterized by angiogenesis. Diabetic retinopathy can be treated by delivering one or more anti-angiogenic antibodies or fusion proteins either intraocularly (e.g., in the vitreous) or periocularly (e.g., in the sub-Tenon's region). Additional ocular diseases that may be treated, ameliorated, or prevented with the ceDNA vectors of the invention include geographic atrophy, vascular or “wet” macular degeneration, PKU, Leber Congenital Amaurosis (LCA), Usher syndrome, pseudoxanthoma elasticum (PXE), x-linked retinitis pigmentosa (XLRP), x-linked retinoschisis (XLRS), Choroideremia, Leber hereditary optic neuropathy (LHON), Archomatopsia, cone-rod dystrophy, Fuchs endothelial corneal dystrophy, diabetic macular edema and ocular cancer and tumors.

[0500] In some embodiments, inflammatory ocular diseases or disorders (e.g., uveitis) can be treated, ameliorated, or prevented by a ceDNA vector for expression of FVIII protein as disclosed herein. One or more anti-inflammatory antibodies or fusion proteins can be expressed by intraocular (e.g., vitreous or anterior chamber) administration of the ceDNA vector as disclosed herein. In some embodiments, a ceDNA vector for expression of FVIII protein as disclosed herein can encode an FVIII protein that is associated with transgene encoding a reporter polypeptide (e.g., an enzyme such as Green Fluorescent Protein, or alkaline phosphatase). In some embodiments, a transgene that encodes a reporter protein useful for experimental or diagnostic purposes, is selected from any of β-lactamase, β-galactosidase (LacZ), alkaline phosphatase, thymidine kinase, green fluorescent protein (GFP), chloramphenicol acetyltransferase (CAT), luciferase, and others well known in the art. In some aspects, ceDNA vectors expressing an FVIII protein linked to a reporter polypeptide may be used for diagnostic purposes, as well as to determine efficacy or as markers of the ceDNA vector's activity in the subject to which they are administered.

C. Testing for Successful Gene Expression Using a ceDNA Vector

[0501] Assays well known in the art can be used to test the efficiency of gene delivery of an FVIII protein by a ceDNA vector can be performed in both in vitro and in vivo models. Levels of the expression of the FVIII protein by ceDNA can be assessed by one skilled in the art by measuring mRNA and protein levels of the FVIII protein (e.g., reverse transcription PCR, western blot analysis, and enzyme-linked immunosorbent assay (ELISA)). In one embodiment, ceDNA comprises a reporter protein that can be used to assess the expression of the FVIII protein, for example by examining the expression of the reporter protein by fluorescence microscopy or a luminescence plate reader. For in vivo applications, protein function assays can be used to test the functionality of a given FVIII protein to determine if gene expression has successfully occurred. One skilled will be able to determine the best test for measuring functionality of an FVIII protein expressed by the ceDNA vector in vitro or in vivo.

[0502] It is contemplated herein that the effects of gene expression of an FVIII protein from the ceDNA vector in a cell or subject can last for at least 1 month, at least 2 months, at least 3 months, at least four months, at least 5 months, at least six months, at least 10 months, at least 12 months, at least 18 months, at least 2 years, at least 5 years, at least 10 years, at least 20 years, or can be permanent.

[0503] In some embodiments, an FVIII protein in the expression cassette, expression construct, or ceDNA vector described herein can be codon optimized for the host cell. As used herein, the term “codon optimized” or “codon optimization” refers to the process of modifying a nucleic acid sequence for enhanced expression in the cells of the vertebrate of interest, e.g., mouse or human (e.g., humanized), by replacing at least one, more than one, or a significant number of codons of the native sequence (e.g., a prokaryotic sequence) with codons that are more frequently or most frequently used in the genes of that vertebrate. Various species exhibit particular bias for certain codons of a particular amino acid. Typically, codon optimization does not alter the amino acid sequence of the original translated protein. Optimized codons can be determined using e.g., Aptagen's Gene Forge® codon optimization and custom gene synthesis platform (Aptagen, Inc.) or another publicly available database.

D. Determining Efficacy by Assessing FVII Protein Expression from the ceDNA Vector

[0504] Essentially any method known in the art for determining protein expression can be used to analyze expression of a FVIII protein from a ceDNA vector. Non-limiting examples of such methods/assays include enzyme-linked immunoassay (ELISA), affinity ELISA, ELISPOT, serial dilution, flow cytometry, surface plasmon resonance analysis, kinetic exclusion assay, mass spectrometry, Western blot, immunoprecipitation, and PCR.

[0505] For assessing FVIII protein expression in vivo, a biological sample can be obtained from a subject for analysis. Exemplary biological samples include a biofluid sample, a body fluid sample, blood (including whole blood), serum, plasma, urine, saliva, a biopsy and/or tissue sample etc. A biological sample or tissue sample can also refer to a sample of tissue or fluid isolated from an individual including, but not limited to, tumor biopsy, stool, spinal fluid, pleural fluid, nipple aspirates, lymph fluid, the external sections of the skin, respiratory, intestinal, and genitourinary tracts, tears, saliva, breast milk, cells (including, but not limited to, blood cells), tumors, organs, and also samples of in vitro cell culture constituent. The term also includes a mixture of the above-mentioned samples. The term “sample” also includes untreated or pretreated (or pre-processed) biological samples. In some embodiments, the sample used for the assays and methods described herein comprises a serum sample collected from a subject to be tested.

### E. Determining Efficacy of the Expressed FVIII Protein by Clinical Parameters

[0506] The efficacy of a given FVIII protein expressed by a ceDNA vector for hemophilia A (i.e., functional expression) can be determined by the skilled clinician. However, a treatment is considered “effective treatment,” as the term is used herein, if any one or all of the signs or symptoms of hemophilia A is/are altered in a beneficial manner, or other clinically accepted symptoms or markers of disease are improved, or ameliorated, e.g., by at least 10% following treatment with a ceDNA vector encoding a therapeutic FVIII protein as described herein. Efficacy can also be measured by failure of an individual to worsen as assessed by stabilization of hemophilia A, or the need for medical interventions (i.e., progression of the disease is halted or at least slowed). Methods of measuring these indicators are known to those of skill in the art and/or described herein. Treatment includes any treatment of a disease in an individual or an animal (some non-limiting examples include a human, or a mammal) and includes: (1) inhibiting hemophilia A, e.g., arresting, or slowing progression of hemophilia A; or (2) relieving the hemophilia A, e.g., causing regression of a hemophilia A symptom; and (3) preventing or reducing the likelihood of the development of the hemophilia A disease, or preventing secondary diseases/disorders associated with hemophilia A. An effective amount for the treatment of a disease means that amount which, when administered to a mammal in need thereof, is sufficient to result in effective treatment as that term is defined herein, for that disease. Efficacy of an agent can be determined by assessing physical indicators that are particular to hemophilia A disease. A physician can assess for any one or more of clinical symptoms of hemophilia A which include: unexplained and excessive bleeding from cuts or injuries, or after surgery or dental work; many large or deep bruises; unusual bleeding after vaccinations; pain, swelling or tightness in your joints; blood in your urine or stool; nosebleeds without a known cause; in infants, unexplained irritability.

### XI. Various Applications of ceDNA Vectors Expressing Antibodies or Fusion Proteins

[0507] As disclosed herein, the compositions and ceDNA vectors for expression of FVIII protein as described herein can be used to express an FVIII protein for a range of purposes. In one embodiment, the ceDNA vector expressing an FVIII protein can be used to create a somatic transgenic animal model harboring the transgene, e.g., to study the function or disease progression of hemophilia A. In some embodiments, a ceDNA vector expressing an FVIII protein is useful for the treatment, prevention, or amelioration of hemophilia A states or disorders in a mammalian subject.

[0508] In some embodiments the FVIII protein can be expressed from the ceDNA vector in a subject in a sufficient amount to treat a disease associated with increased expression, increased activity of the gene product, or inappropriate upregulation of a gene.

[0509] In some embodiments the FVIII protein can be expressed from the ceDNA vector in a subject in a sufficient amount to treat hemophilia A with a reduced expression, lack of expression or dysfunction of a protein.

[0510] It will be appreciated by one of ordinary skill in the art that the transgene may not be an open reading frame of a gene to be transcribed itself; instead it may be a promoter region or repressor region of a target gene, and the ceDNA vector may modify such region with the outcome of so modulating the expression of the FVIII gene.

[0511] The compositions and ceDNA vectors for expression of FVIII protein as disclosed herein can be used to deliver an FVIII protein for various purposes as described above.

[0512] In some embodiments, the transgene encodes one or more FVIII proteins which are useful for the treatment, amelioration, or prevention of hemophilia A states in a mammalian subject. The FVIII protein expressed by the ceDNA vector is administered to a patient in a sufficient amount to treat hemophilia A associated with an abnormal gene sequence, which can result in any one or more of the following: increased protein expression, over activity of the protein, reduced expression, lack of expression or dysfunction of the target gene or protein.

[0513] In some embodiments, the ceDNA vectors for expression of FVIII protein as disclosed herein are envisioned for use in diagnostic and screening methods, whereby an FVIII protein is transiently or stably expressed in a cell culture system, or alternatively, a transgenic animal model.

[0514] Another aspect of the technology described herein provides a method of transducing a population of mammalian cells with a ceDNA vector for expression of FVIII protein as disclosed herein. In an overall and general sense, the method includes at least the step of introducing into one or more cells of the population, a composition that comprises an effective amount of one or more of the ceDNA vectors for expression of FVIII protein as disclosed herein.

[0515] Additionally, the present invention provides compositions, as well as therapeutic and/or diagnostic kits that include one or more of the disclosed ceDNA vectors for expression of FVIII protein as disclosed herein or ceDNA compositions, formulated with one or more additional ingredients, or prepared with one or more instructions for their use.

[0516] A cell to be administered a ceDNA vector for expression of FVIII protein as disclosed herein may be of any type, including but not limited to neural cells (including cells of the peripheral and central nervous systems, in particular, brain cells), lung cells, retinal cells, epithelial cells (e.g., gut and respiratory epithelial cells), muscle cells, dendritic cells, pancreatic cells (including islet cells), hepatic cells, myocardial cells, bone cells (e.g., bone marrow stem cells), hematopoietic stem cells, spleen cells, keratinocytes, fibroblasts, endothelial cells, prostate cells, germ cells, and the like. Alternatively, the cell may be any progenitor cell. As a further alternative, the cell can be a stem cell (e.g., neural stem cell, liver stem cell). As still a further alternative, the cell may be a cancer or tumor cell. Moreover, the cells can be from any species of origin, as indicated above.

A. Production and Purification of ceDNA Vectors Expressing FVIII

[0517] The ceDNA vectors disclosed herein are to be used to produce FVIII protein either in vitro or in vivo. The FVIII proteins produced in this manner can be isolated, tested for a desired function, and purified for further use in research or as a therapeutic treatment. Each system of protein production has its own advantages/disadvantages. While proteins produced in vitro can be easily purified and can proteins in a short time, proteins produced in vivo can have post-translational modifications, such as glycosylation.

[0518] FVIII therapeutic protein produced using ceDNA vectors can be purified using any method known to those of skill in the art, for example, ion exchange chromatography, affinity chromatography, precipitation, or electrophoresis.

[0519] An FVIII therapeutic protein produced by the methods and compositions described herein can be tested for binding to the desired target protein.

### EXAMPLES

[0520] The following examples are provided by way of illustration not limitation. It will be appreciated by one of ordinary skill in the art that ceDNA vectors can be constructed from any of the wild-type or modified ITRs described herein, and that the following exemplary methods can be used to construct and assess the activity of such ceDNA vectors. While the methods are exemplified with certain ceDNA vectors, they are applicable to any ceDNA vector in keeping with the description.

### Example 1: Constructing ceDNA Vectors Using an Insect Cell-Based Method

[0521] Production of the ceDNA vectors using a polynucleotide construct template is described in Example 1 of PCT/US18/49996, which is incorporated herein in its entirety by reference. For example, a polynucleotide construct template used for generating the ceDNA vectors of the present invention can be a ceDNA-plasmid, a ceDNA-Bacmid, and/or a ceDNA-baculovirus. Without being limited to theory, in a permissive host cell, in the presence of e.g., Rep, the polynucleotide construct template having two symmetric ITRs and an expression construct, where at least one of the ITRs is modified relative to a wild-type ITR sequence, replicates to produce ceDNA vectors. ceDNA vector production undergoes two steps: first, excision (“rescue”) of template from the template backbone (e.g. ceDNA-plasmid, ceDNA-bacmid, ceDNA-baculovirus genome etc.) via Rep proteins, and second, Rep mediated replication of the excised ceDNA vector.

[0522] An exemplary method to produce ceDNA vectors is from a ceDNA-plasmid as described herein. Referring to FIGS. 1A and 1B, the polynucleotide construct template of each of the ceDNA-plasmids includes both a left modified ITR and a right modified ITR with the following between the ITR sequences: (i) an enhancer/promoter; (ii) a cloning site for a transgene; (iii) a posttranscriptional response element (e.g. the woodchuck hepatitis virus posttranscriptional regulatory element (WPRE)); and (iv) a poly-adenylation signal (e.g. from bovine growth hormone gene (BGHpA). Unique restriction endonuclease recognition sites (R1-R6) (shown in FIG. 1A and FIG. 1B) were also introduced between each component to facilitate the introduction of new genetic components into the specific sites in the construct. R3 (PmeI) GTTTAAAC (SEQ ID NO: 123) and R4 (Pacd) TTAATTAA (SEQ ID NO: 124) enzyme sites are engineered into the cloning site to introduce an open reading frame of a transgene. These sequences were cloned into a pFastBac HT B plasmid obtained from ThermoFisher Scientific.

Production of ceDNA-Bacmids:

[0523] DH10Bac competent cells (MAX EFFICIENCY® DH10Bac™ Competent Cells, Thermo Fisher) were transformed with either test or control plasmids following a protocol according to the manufacturer's instructions. Recombination between the plasmid and a baculovirus shuttle vector in the DH10Bac cells were induced to generate recombinant ceDNA-bacmids. The recombinant bacmids were selected by screening a positive selection based on blue-white screening in E. coli ((D80dlacZΔM15 marker provides α-complementation of the β-galactosidase gene from the bacmid vector) on a bacterial agar plate containing X-gal and IPTG with antibiotics to select for transformants and maintenance of the bacmid and transposase plasmids. White colonies caused by transposition that disrupts the β-galactoside indicator gene were picked and cultured in 10 ml of media.

[0524] The recombinant ceDNA-bacmids were isolated from the E. coli and transfected into Sf9 or Sf21 insect cells using FugeneHD to produce infectious baculovirus. The adherent Sf9 or Sf21 insect cells were cultured in 50 ml of media in T25 flasks at 25° C. Four days later, culture medium (containing the P0 virus) was removed from the cells, filtered through a 0.45 μm filter, separating the infectious baculovirus particles from cells or cell debris.

[0525] Optionally, the first generation of the baculovirus (P0) was amplified by infecting naïve Sf9 or Sf21 insect cells in 50 to 500 ml of media. Cells were maintained in suspension cultures in an orbital shaker incubator at 130 rpm at 25° C., monitoring cell diameter and viability, until cells reach a diameter of 18-19 nm (from a naïve diameter of 14-15 nm), and a density of ˜4.0E+6 cells/mL. Between 3 and 8 days post-infection, the P1 baculovirus particles in the medium were collected following centrifugation to remove cells and debris then filtration through a 0.45 μm filter.

[0526] The ceDNA-baculovirus comprising the test constructs were collected and the infectious activity, or titer, of the baculovirus was determined. Specifically, four×20 ml Sf9 cell cultures at 2.5E+6 cells/ml were treated with P1 baculovirus at the following dilutions: 1/1000, 1/10,000, 1/50,000, 1/100,000, and incubated at 25-27° C. Infectivity was determined by the rate of cell diameter increase and cell cycle arrest, and change in cell viability every day for 4 to 5 days.

[0527] A “Rep-plasmid” as disclosed in FIG. 8A of PCT/US18/49996, which is incorporated herein in its entirety by reference, was produced in a pFASTBAC™-Dual expression vector (ThermoFisher) comprising both the Rep78 (SEQ ID NO: 131 or 133) and Rep52 (SEQ ID NO: 132) or Rep68 (SEQ ID NO: 130) and Rep40 (SEQ ID NO: 129). The Rep-plasmid was transformed into the DH10Bac competent cells (MAX EFFICIENCY® DH10Bac™ Competent Cells (Thermo Fisher) following a protocol provided by the manufacturer. Recombination between the Rep-plasmid and a baculovirus shuttle vector in the DH10Bac cells were induced to generate recombinant bacmids (“Rep-bacmids”). The recombinant bacmids were selected by a positive selection that included-blue-white screening in E. coli (Φ80dlacZΔM15 marker provides α-complementation of the β-galactosidase gene from the bacmid vector) on a bacterial agar plate containing X-gal and IPTG. Isolated white colonies were picked and inoculated in 10 ml of selection media (kanamycin, gentamicin, tetracycline in LB broth). The recombinant bacmids (Rep-bacmids) were isolated from the E. co/i and the Rep-bacmids were transfected into Sf9 or Sf21 insect cells to produce infectious baculovirus.

[0528] The Sf9 or Sf21 insect cells were cultured in 50 ml of media for 4 days, and infectious recombinant baculovirus (“Rep-baculovirus”) were isolated from the culture. Optionally, the first generation Rep-baculovirus (P0) were amplified by infecting naïve Sf9 or Sf21 insect cells and cultured in 50 to 500 ml of media. Between 3 and 8 days post-infection, the P1 baculovirus particles in the medium were collected either by separating cells by centrifugation or filtration or another fractionation process. The Rep-baculovirus were collected and the infectious activity of the baculovirus was determined. Specifically, four×20 mL Sf9 cell cultures at 2.5×10⁶ cells/mL were treated with P1 baculovirus at the following dilutions, 1/1000, 1/10,000, 1/50,000, 1/100,000, and incubated. Infectivity was determined by the rate of cell diameter increase and cell cycle arrest, and change in cell viability every day for 4 to 5 days.

ceDNA Vector Generation and Characterization

[0529] With reference to FIG. 4B, Sf9 insect cell culture media containing either (1) a sample-containing a ceDNA-bacmid or a ceDNA-baculovirus, and (2) Rep-baculovirus described above were then added to a fresh culture of Sf9 cells (2.5E+6 cells/ml, 20 ml) at a ratio of 1:1000 and 1:10,000, respectively. The cells were then cultured at 130 rpm at 25° C. 4-5 days after the co-infection, cell diameter and viability are detected. When cell diameters reached 18-20 nm with a viability of ˜70-80%, the cell cultures were centrifuged, the medium was removed, and the cell pellets were collected. The cell pellets are first resuspended in an adequate volume of aqueous medium, either water or buffer. The ceDNA vector was isolated and purified from the cells using Qiagen MIDI PLUS™ purification protocol (Qiagen, 0.2 mg of cell pellet mass processed per column).

[0530] Yields of ceDNA vectors produced and purified from the Sf9 insect cells were initially determined based on UV absorbance at 260 nm.

[0531] ceDNA vectors can be assessed by identified by agarose gel electrophoresis under native or denaturing conditions as illustrated in FIG. 4D, where (a) the presence of characteristic bands migrating at twice the size on denaturing gels versus native gels after restriction endonuclease cleavage and gel electrophoretic analysis and (b) the presence of monomer and dimer (2×) bands on denaturing gels for uncleaved material is characteristic of the presence of ceDNA vector.

[0532] Structures of the isolated ceDNA vectors were further analyzed by digesting the DNA obtained from co-infected Sf9 cells (as described herein) with restriction endonucleases selected for a) the presence of only a single cut site within the ceDNA vectors, and b) resulting fragments that were large enough to be seen clearly when fractionated on a 0.8% denaturing agarose gel (>800 bp). As illustrated in FIGS. 4D and 4E, linear DNA vectors with a non-continuous structure and ceDNA vector with the linear and continuous structure can be distinguished by sizes of their reaction products—for example, a DNA vector with a non-continuous structure is expected to produce 1 kb and 2 kb fragments, while a non-encapsidated vector with the continuous structure is expected to produce 2 kb and 4 kb fragments.

[0533] Therefore, to demonstrate in a qualitative fashion that isolated ceDNA vectors are covalently closed-ended as is required by definition, the samples were digested with a restriction endonuclease identified in the context of the specific DNA vector sequence as having a single restriction site, preferably resulting in two cleavage products of unequal size (e.g., 1000 bp and 2000 bp). Following digestion and electrophoresis on a denaturing gel (which separates the two complementary DNA strands), a linear, non-covalently closed DNA will resolve at sizes 1000 bp and 2000 bp, while a covalently closed DNA (i.e., a ceDNA vector) will resolve at 2× sizes (2000 bp and 4000 bp), as the two DNA strands are linked and are now unfolded and twice the length (though single stranded). Furthermore, digestion of monomeric, dimeric, and n-meric forms of the DNA vectors will all resolve as the same size fragments due to the end-to-end linking of the multimeric DNA vectors (see FIG. 4D).

[0534] As used herein, the phrase “assay for the Identification of DNA vectors by agarose gel electrophoresis under native gel and denaturing conditions” refers to an assay to assess the close-endedness of the ceDNA by performing restriction endonuclease digestion followed by electrophoretic assessment of the digest products. One such exemplary assay follows, though one of ordinary skill in the art will appreciate that many art-known variations on this example are possible. The restriction endonuclease is selected to be a single cut enzyme for the ceDNA vector of interest that will generate products of approximately ⅓× and ⅔× of the DNA vector length. This resolves the bands on both native and denaturing gels. Before denaturation, it is important to remove the buffer from the sample. The Qiagen PCR clean-up kit or desalting “spin columns,” e.g. GE HEALTHCARE ILUSTRA™ MICROSPIN™ G-25 columns are some art-known options for the endonuclease digestion. The assay includes for example, i) digest DNA with appropriate restriction endonuclease(s), 2) apply to e.g., a Qiagen PCR clean-up kit, elute with distilled water, iii) adding 10× denaturing solution (10×=0.5 M NaOH, 10 mM EDTA), add 10× dye, not buffered, and analyzing, together with DNA ladders prepared by adding 10× denaturing solution to 4×, on a 0.8-1.0% gel previously incubated with 1 mM EDTA and 200 mM NaOH to ensure that the NaOH concentration is uniform in the gel and gel box, and running the gel in the presence of 1× denaturing solution (50 mM NaOH, 1 mM EDTA). One of ordinary skill in the art will appreciate what voltage to use to run the electrophoresis based on size and desired timing of results. After electrophoresis, the gels are drained and neutralized in 1×TBE or TAE and transferred to distilled water or 1×TBE/TAE with 1×SYBR Gold. Bands can then be visualized with e.g. Thermo Fisher, SYBR® Gold Nucleic Acid Gel Stain (10,000× Concentrate in DMSO) and epifluorescent light (blue) or UV (312 nm).

[0535] The purity of the generated ceDNA vector can be assessed using any art-known method. As one exemplary and non-limiting method, contribution of ceDNA-plasmid to the overall UV absorbance of a sample can be estimated by comparing the fluorescent intensity of ceDNA vector to a standard. For example, if based on UV absorbance 4 μg of ceDNA vector was loaded on the gel, and the ceDNA vector fluorescent intensity is equivalent to a 2 kb band which is known to be 1 μg, then there is 1 μg of ceDNA vector, and the ceDNA vector is 25% of the total UV absorbing material. Band intensity on the gel is then plotted against the calculated input that band represents—for example, if the total ceDNA vector is 8 kb, and the excised comparative band is 2 kb, then the band intensity would be plotted as 25% of the total input, which in this case would be 0.25 μg for 1.0 μg input. Using the ceDNA vector plasmid titration to plot a standard curve, a regression line equation is then used to calculate the quantity of the ceDNA vector band, which can then be used to determine the percent of total input represented by the ceDNA vector, or percent purity.

[0536] For comparative purposes, Example 1 describes the production of ceDNA vectors using an insect cell based method and a polynucleotide construct template, and is also described in Example 1 of PCT/US18/49996, which is incorporated herein in its entirety by reference. For example, a polynucleotide construct template used for generating the ceDNA vectors of the present invention according to Example 1 can be a ceDNA-plasmid, a ceDNA-Bacmid, and/or a ceDNA-baculovirus. Without being limited to theory, in a permissive host cell, in the presence of e.g., Rep, the polynucleotide construct template having two symmetric ITRs and an expression construct, where at least one of the ITRs is modified relative to a wild-type ITR sequence, replicates to produce ceDNA vectors. ceDNA vector production undergoes two steps: first, excision (“rescue”) of template from the template backbone (e.g. ceDNA-plasmid, ceDNA-bacmid, ceDNA-baculovirus genome etc.) via Rep proteins, and second, Rep mediated replication of the excised ceDNA vector.

[0537] An exemplary method to produce ceDNA vectors in a method using insect cell is from a ceDNA-plasmid as described herein. Referring to FIGS. 1A and 1B, the polynucleotide construct template of each of the ceDNA-plasmids includes both a left modified ITR and a right modified ITR with the following between the ITR sequences: (i) an enhancer/promoter; (ii) a cloning site for a transgene; (iii) a posttranscriptional response element (e.g. the woodchuck hepatitis virus posttranscriptional regulatory element (WPRE)); and (iv) a poly-adenylation signal (e.g. from bovine growth hormone gene (BGHpA). Unique restriction endonuclease recognition sites (R1-R6) (shown in FIG. 1A and FIG. 1B) were also introduced between each component to facilitate the introduction of new genetic components into the specific sites in the construct. R3 (PmeI) GTTTAAAC (SEQ ID NO: 123) and R4 (Pacd) TTAATTAA (SEQ ID NO: 124) enzyme sites are engineered into the cloning site to introduce an open reading frame of a transgene. These sequences were cloned into a pFastBac HT B plasmid obtained from ThermoFisher Scientific.

### Example 2: Synthetic ceDNA Production Via Excision from a Double-Stranded DNA Molecule

[0538] Synthetic production of the ceDNA vectors is described in Examples 2-6 of International Application PCT/US19/14122, filed Jan. 18, 2019, which is incorporated herein in its entirety by reference. One exemplary method of producing a ceDNA vector using a synthetic method that involves the excision of a double-stranded DNA molecule. In brief, a ceDNA vector can be generated using a double stranded DNA construct, e.g., see FIGS. 7A-8E of PCT/US19/14122. In some embodiments, the double stranded DNA construct is a ceDNA plasmid, e.g., see, e.g., FIG. 6 in International patent application PCT/US2018/064242, filed Dec. 6, 2018).

[0539] In some embodiments, a construct to make a ceDNA vector comprises a regulatory switch as described herein.

[0540] For illustrative purposes, Example 2 describes producing ceDNA vectors as exemplary closed-ended DNA vectors generated using this method. However, while ceDNA vectors are exemplified in this Example to illustrate in vitro synthetic production methods to generate a closed-ended DNA vector by excision of a double-stranded polynucleotide comprising the ITRs and expression cassette (e.g., heterologous nucleic acid sequence) followed by ligation of the free 3′ and 5′ ends as described herein, one of ordinary skill in the art is aware that one can, as illustrated above, modify the double stranded DNA polynucleotide molecule such that any desired closed-ended DNA vector is generated, including but not limited to, doggybone DNA, dumbbell DNA and the like. Exemplary ceDNA vectors for production of antibodies or fusion proteins that can be produced by the synthetic production method described in Example 2 are discussed in the sections entitled “III ceDNA vectors in general”. Exemplary antibodies and fusion proteins expressed by the ceDNA vectors are described in the section entitled “IIC Exemplary antibodies and fusion proteins expressed by the ceDNA vectors”.

[0541] The method involves (i) excising a sequence encoding the expression cassette from a double-stranded DNA construct and (ii) forming hairpin structures at one or more of the ITRs and (iii) joining the free 5′ and 3′ ends by ligation, e.g., by T4 DNA ligase.

[0542] The double-stranded DNA construct comprises, in 5′ to 3′ order: a first restriction endonuclease site; an upstream ITR; an expression cassette; a downstream ITR; and a second restriction endonuclease site. The double-stranded DNA construct is then contacted with one or more restriction endonucleases to generate double-stranded breaks at both of the restriction endonuclease sites. One endonuclease can target both sites, or each site can be targeted by a different endonuclease as long as the restriction sites are not present in the ceDNA vector template. This excises the sequence between the restriction endonuclease sites from the rest of the double-stranded DNA construct (see FIG. 9 of PCT/US19/14122). Upon ligation a closed-ended DNA vector is formed.

[0543] One or both of the ITRs used in the method may be wild-type ITRs. Modified ITRs may also be used, where the modification can include deletion, insertion, or substitution of one or more nucleotides from the wild-type ITR in the sequences forming B and B′ arm and/or C and C′ arm (see, e.g., FIGS. 6-8 and 10 FIG. 11B of PCT/US19/14122), and may have two or more hairpin loops (see, e.g., FIGS. 6-8 FIG. 11B of PCT/US19/14122) or a single hairpin loop (see, e.g., FIG. 10A-10B FIG. 11B of PCT/US19/14122). The hairpin loop modified ITR can be generated by genetic modification of an existing oligo or by de novo biological and/or chemical synthesis.

[0544] In a non-limiting example, ITR-6 Left and Right (SEQ ID NOS: 111 and 112), include 40 nucleotide deletions in the B-B′ and C-C′ arms from the wild-type ITR of AAV2. Nucleotides remaining in the modified ITR are predicted to form a single hairpin structure. Gibbs free energy of unfolding the structure is about −54.4 kcal/mol. Other modifications to the ITR may also be made, including optional deletion of a functional Rep binding site or a TRS site.

### Example 3: CeDNA Production Via Oligonucleotide Construction

[0545] Another exemplary method of producing a ceDNA vector using a synthetic method that involves assembly of various oligonucleotides, is provided in Example 3 of PCT/US19/14122, where a ceDNA vector is produced by synthesizing a 5′ oligonucleotide and a 3′ ITR oligonucleotide and ligating the ITR oligonucleotides to a double-stranded polynucleotide comprising an expression cassette. FIG. 11B of PCT/US19/14122 shows an exemplary method of ligating a 5′ ITR oligonucleotide and a 3′ ITR oligonucleotide to a double stranded polynucleotide comprising an expression cassette.

[0546] As disclosed herein, the ITR oligonucleotides can comprise WT-ITRs (e.g., see FIG. 3A, FIG. 3C), or modified ITRs (e.g., see, FIG. 3B and FIG. 3D). (See also, e.g., FIGS. 6A, 6B, 7A and 7B of PCT/US19/14122, which is incorporated herein in its entirety). Exemplary ITR oligonucleotides include, but are not limited to SEQ ID NOS: 134-145 (e.g., see Table 7 in of PCT/US19/14122). Modified ITRs can include deletion, insertion, or substitution of one or more nucleotides from the wild-type ITR in the sequences forming B and B′ arm and/or C and C′ arm. ITR oligonucleotides, comprising WT-ITRs or mod-ITRs as described herein, to be used in the cell-free synthesis, can be generated by genetic modification or biological and/or chemical synthesis. As discussed herein, the ITR oligonucleotides in Examples 2 and 3 can comprise WT-ITRs, or modified ITRs (mod-ITRs) in symmetrical or asymmetrical configurations, as discussed herein.

### Example 4: CeDNA Production Via a Single-Stranded DNA Molecule

[0547] Another exemplary method of producing a ceDNA vector using a synthetic method is provided in Example 4 of PCT/US19/14122, and uses a single-stranded linear DNA comprising two sense ITRs which flank a sense expression cassette sequence and are attached covalently to two antisense ITRs which flank an antisense expression cassette, the ends of which single stranded linear DNA are then ligated to form a closed-ended single-stranded molecule. One non-limiting example comprises synthesizing and/or producing a single-stranded DNA molecule, annealing portions of the molecule to form a single linear DNA molecule which has one or more base-paired regions of secondary structure, and then ligating the free 5′ and 3′ ends to each other to form a closed single-stranded molecule.

[0548] An exemplary single-stranded DNA molecule for production of a ceDNA vector comprises, from 5′ to 3′: a sense first ITR; a sense expression cassette sequence; a sense second ITR; an antisense second ITR; an antisense expression cassette sequence; and an antisense first ITR.

[0549] A single-stranded DNA molecule for use in the exemplary method of Example 4 can be formed by any DNA synthesis methodology described herein, e.g., in vitro DNA synthesis, or provided by cleaving a DNA construct (e.g., a plasmid) with nucleases and melting the resulting dsDNA fragments to provide ssDNA fragments.

[0550] Annealing can be accomplished by lowering the temperature below the calculated melting temperatures of the sense and antisense sequence pairs. The melting temperature is dependent upon the specific nucleotide base content and the characteristics of the solution being used, e.g., the salt concentration. Melting temperatures for any given sequence and solution combination are readily calculated by one of ordinary skill in the art.

[0551] The free 5′ and 3′ ends of the annealed molecule can be ligated to each other, or ligated to a hairpin molecule to form the ceDNA vector. Suitable exemplary ligation methodologies and hairpin molecules are described in Examples 2 and 3.

### Example 5: Purifying and/or Confirming Production of ceDNA

[0552] Any of the DNA vector products produced by the methods described herein, e.g., including the insect cell based production methods described in Example 1, or synthetic production methods described in Examples 2-4 can be purified, e.g., to remove impurities, unused components, or byproducts using methods commonly known by a skilled artisan; and/or can be analyzed to confirm that DNA vector produced, (in this instance, a ceDNA vector) is the desired molecule. An exemplary method for purification of the DNA vector, e.g., ceDNA is using Qiagen Midi Plus purification protocol (Qiagen) and/or by gel purification,

[0553] The following is an exemplary method for confirming the identity of ceDNA vectors.

[0554] ceDNA vectors can be assessed by identified by agarose gel electrophoresis under native or denaturing conditions as illustrated in FIG. 4D, where (a) the presence of characteristic bands migrating at twice the size on denaturing gels versus native gels after restriction endonuclease cleavage and gel electrophoretic analysis and (b) the presence of monomer and dimer (2×) bands on denaturing gels for uncleaved material is characteristic of the presence of ceDNA vector.

[0555] Structures of the isolated ceDNA vectors were further analyzed by digesting the purified DNA with restriction endonucleases selected for a) the presence of only a single cut site within the ceDNA vectors, and b) resulting fragments that were large enough to be seen clearly when fractionated on a 0.8% denaturing agarose gel (>800 bp). As illustrated in FIGS. 4C and 4D, linear DNA vectors with a non-continuous structure and ceDNA vector with the linear and continuous structure can be distinguished by sizes of their reaction products—for example, a DNA vector with a non-continuous structure is expected to produce 1 kb and 2 kb fragments, while a ceDNA vector with the continuous structure is expected to produce 2 kb and 4 kb fragments.

[0556] Therefore, to demonstrate in a qualitative fashion that isolated ceDNA vectors are covalently closed-ended as is required by definition, the samples were digested with a restriction endonuclease identified in the context of the specific DNA vector sequence as having a single restriction site, preferably resulting in two cleavage products of unequal size (e.g., 1000 bp and 2000 bp). Following digestion and electrophoresis on a denaturing gel (which separates the two complementary DNA strands), a linear, non-covalently closed DNA will resolve at sizes 1000 bp and 2000 bp, while a covalently closed DNA (i.e., a ceDNA vector) will resolve at 2× sizes (2000 bp and 4000 bp), as the two DNA strands are linked and are now unfolded and twice the length (though single stranded). Furthermore, digestion of monomeric, dimeric, and n-meric forms of the DNA vectors will all resolve as the same size fragments due to the end-to-end linking of the multimeric DNA vectors (see FIG. 4E).

[0557] As used herein, the phrase “assay for the Identification of DNA vectors by agarose gel electrophoresis under native gel and denaturing conditions” refers to an assay to assess the close-endedness of the ceDNA by performing restriction endonuclease digestion followed by electrophoretic assessment of the digest products. One such exemplary assay follows, though one of ordinary skill in the art will appreciate that many art-known variations on this example are possible. The restriction endonuclease is selected to be a single cut enzyme for the ceDNA vector of interest that will generate products of approximately ⅓× and ⅔× of the DNA vector length. This resolves the bands on both native and denaturing gels. Before denaturation, it is important to remove the buffer from the sample. The Qiagen PCR clean-up kit or desalting “spin columns,” e.g. GE HEALTHCARE ILUSTRA™ MICROSPIN™ G-25 columns are some art-known options for the endonuclease digestion. The assay includes for example, i) digest DNA with appropriate restriction endonuclease(s), 2) apply to e.g., a Qiagen PCR clean-up kit, elute with distilled water, iii) adding 10× denaturing solution (10×=0.5 M NaOH, 10 mM EDTA), add 10× dye, not buffered, and analyzing, together with DNA ladders prepared by adding 10× denaturing solution to 4×, on a 0.8-1.0% gel previously incubated with 1 mM EDTA and 200 mM NaOH to ensure that the NaOH concentration is uniform in the gel and gel box, and running the gel in the presence of 1× denaturing solution (50 mM NaOH, 1 mM EDTA). One of ordinary skill in the art will appreciate what voltage to use to run the electrophoresis based on size and desired timing of results. After electrophoresis, the gels are drained and neutralized in 1×TBE or TAE and transferred to distilled water or 1×TBE/TAE with 1×SYBR Gold. Bands can then be visualized with e.g. Thermo Fisher, SYBR® Gold Nucleic Acid Gel Stain (10,000× Concentrate in DMSO) and epifluorescent light (blue) or UV (312 nm). The foregoing gel-based method can be adapted to purification purposes by isolating the ceDNA vector from the gel band and permitting it to renature.

[0558] The purity of the generated ceDNA vector can be assessed using any art-known method. As one exemplary and non-limiting method, contribution of ceDNA-plasmid to the overall UV absorbance of a sample can be estimated by comparing the fluorescent intensity of ceDNA vector to a standard. For example, if based on UV absorbance 4 μg of ceDNA vector was loaded on the gel, and the ceDNA vector fluorescent intensity is equivalent to a 2 kb band which is known to be 1 μg, then there is 1 μg of ceDNA vector, and the ceDNA vector is 25% of the total UV absorbing material. Band intensity on the gel is then plotted against the calculated input that band represents—for example, if the total ceDNA vector is 8 kb, and the excised comparative band is 2 kb, then the band intensity would be plotted as 25% of the total input, which in this case would be 0.25 μg for 1.0 μg input. Using the ceDNA vector plasmid titration to plot a standard curve, a regression line equation is then used to calculate the quantity of the ceDNA vector band, which can then be used to determine the percent of total input represented by the ceDNA vector, or percent purity.

### Example 6: Controlled Transgene Expression from ceDNA: Transgene Expression from the ceDNA Vector In Vivo can be Sustained and/or Increased by Re-Dose Administration

[0559] A ceDNA vector was produced according to the methods described in Example 1 above, using a ceDNA plasmid comprising a CAG promoter (SEQ ID NO: 72) and a luciferase transgene (SEQ ID NO: 56) as an exemplary FVIII, flanked between asymmetric ITRs (e.g., a 5′ WT-ITR (SEQ ID NO: 2) and a 3′ mod-ITR (SEQ ID NO: 3) and was assessed in different treatment programs in vivo. This ceDNA vector was used in all subsequent experiments described in Examples 6-10. In Example 6, the ceDNA vector was purified and formulated with a lipid nanoparticle (LNP ceDNA) and injected into the tail vein of each CD-1® IGS mice. Liposomes were formulated with a suitable lipid blend comprising four components to form lipid nanoparticles (LNP) liposomes, including cationic lipids, helper lipids, cholesterol and PEG-lipids.

[0560] To assess the sustained expression of the transgene in vivo from the ceDNA vector over a long time period, the LNP-ceDNA was administered in sterile PBS by tail vein intravenous injection to CD-1® IGS mice of approximately 5-7 weeks of age. Three different dosage groups were assessed: 0.1 mg/kg, 0.5 mg/kg, and 1.0 mg/kg, ten mice per group (except 1.0 mg/kg which had 15 mice per group). Injections were administered on day 0. Five mice from each of the groups were injected with an additional identical dose on day 28. Luciferase expression was measured by IVIS imaging following intravenous administration into CD-1® IGS mice (Charles River Laboratories; WT mice). Luciferase expression was assessed by IVIS imaging following intraperitoneal injection of 150 mg/kg luciferin substrate on days 3, 4, 7, 14, 21, 28, 31, 35, and 42, and routinely (e.g., weekly, biweekly or every 10-days or every 2 weeks), between days 42-110 days. Luciferase transgene expression as the exemplary FVIII as measured by IVIS imaging for at least 132 days after 3 different administration protocols (data not shown).

[0561] An extension study was performed to investigate the effect of a re-dose, e.g., a re-administration of LNP-ceDNA expressing luciferase of the LNP-ceDNA treated subjects. In particular, it was assessed to determine if expression levels can be increased by one or more additional administrations of the ceDNA vector.

[0562] In this study, the biodistribution of luciferase expression from a ceDNA vector was assessed by IVIS in CD-1® IGS mice after an initial intravenous administration of 1.0 mg/kg (i.e., a priming dose) at days 0 and 28 (Group A). A second administration of a ceDNA vector was administered via tail vein injection of 3 mg/kg (Group B) or 10 mg/kg (Group C) in 1.2 mL in the tail vein at day 84. In this study, five (5) CD-1® mice were used in each of Groups A, B and C. IVIS imaging of the mice for luciferase expression was performed prior to the additional dosing at days 49, 56, 63, and 70 as described above, as well as post-redose on day 84 and on days 91, 98, 105, 112, and 132. Luciferase expression was assessed and detected in all three Groups A, B and C until at least 110 days (the longest time period assessed).

[0563] The level of expression of luciferase was shown to be increased by a re-dose (i.e., re-administration of the ceDNA composition) of the LNP-ceDNA-Luc, as determined by assessment of luciferase activity in the presence of luciferin. Luciferase transgene expression as an exemplary FVIII as measured by IVIS imaging for at least 110 days after 3 different administration protocols (Groups A, B and C). The mice that had not been given any additional redose (1 mg/kg priming dose (i.e., Group A) treatment had stable luciferase expression observed over the duration of the study. The mice in Group B that had been administered a re-dose of 3 mg/kg of the ceDNA vector showed an approximately seven-fold increase in observed radiance relative to the mice in Group C. Surprisingly, the mice re-dosed with 10 mg/kg of the ceDNA vector had a 17-fold increase in observed luciferase radiance over the mice not receiving any redose (Group A).

[0564] Group A shows luciferase expression in CD-1® IGS mice after intravenous administration of 1 mg/kg of a ceDNA vector into the tail vein at days 0 and 28. Group B and C show luciferase expression in CD-1® IGS mice administered 1 mg/kg of a ceDNA vector at a first time point (day 0) and re-dosed with administration of a ceDNA vector at a second time point of 84 days. The second administration (i.e., re-dose) of the ceDNA vector increased expression by at least 7-fold, even up to 17-fold.

[0565] A 3-fold increase in the dose (i.e., the amount) of ceDNA vector in a re-dose administration in Group B (i.e., 3 mg/kg administered at re-dose) resulted in a 7-fold increase in expression of the luciferase. Also, unexpectedly, a 10-fold increase in the amount of ceDNA vector in a re-dose administration (i.e., 10 mg/kg re-dose administered) in Group C resulted in a 17-fold increase in expression of the luciferase. Thus, the second administration (i.e., re-dose) of the ceDNA increased expression by at least 7-fold, even up to 17-fold. This shows that the increase in transgene expression from the re-dose is greater than expected and dependent on the dose or amount of the ceDNA vector in the re-dose administration, and appears to be synergistic to the initial transgene expression from the initial priming administration at day 0. That is, the dose-dependent increase in transgene expression is not additive, rather, the expression level of the transgene is dose-dependent and greater than the sum of the amount of the ceDNA vector administered at each time point.

[0566] Both Groups B and C showed significant dose-dependent increase in expression of luciferase as compared to control mice (Group A) that were not re-dosed with a ceDNA vector at the second time point. Taken together, these data show that the expression of a transgene from ceDNA vector can be increased in a dose-dependent manner by re-dose (i.e., re-administration) of the ceDNA vector at least a second time point.

[0567] Taken together, these data demonstrate that the expression level of a transgene, e.g., FVIII from ceDNA vectors can be maintained at a sustained level for at least 84 days and can be increased in vivo after a redose of the ceDNA vector administered at least at a second time point.

### Example 7: Sustained Transgene Expression In Vivo of LNP-Formulated ceDNA Vectors

[0568] The reproducibility of the results in Example 6 with a different lipid nanoparticle was assessed in vivo in mice. Mice were dosed on day 0 with either ceDNA vector comprising a luciferase transgene driven by a CAG promoter that was encapsulated in an LNP different from that used in Example 6 or with that same LNP comprising polyC but lacking ceDNA or a luciferase gene. Specifically, male CD-1® mice of approximately 4 weeks of age were treated with a single injection of 0.5 mg/kg LNP-ceDNA-luciferase or control LNP-polyC, administered intravenously via lateral tail vein on day 0. At day 14 animals were dosed systemically with luciferin at 150 mg/kg via intraperitoneal injection at 2.5 mL/kg. At approximately 15 minutes after luciferin administration each animal was imaged using an In Vivo Imaging System (“IVIS”).

[0569] As shown in FIG. 7, significant fluorescence in the liver was observed in all four ceDNA-treated mice, and very little other fluorescence was observed in the animals other than at the injection site, indicating that the LNP mediated liver-specific delivery of the ceDNA construct and that the delivered ceDNA vector was capable of controlled sustained expression of its transgene for at least two weeks after administration.

### Example 8: Sustained Transgene Expression in the Liver In Vivo from ceDNA Vector Administration

[0570] In a separate experiment, the localization of LNP-delivered ceDNA within the liver of treated animals was assessed. A ceDNA vector comprising a functional transgene of interest was encapsulated in the same LNP as used in Example 7 and administered to mice in vivo at a dose level of 0.5 mg/kg by intravenous injection. After 6 hours the mice were terminated and liver samples taken, formalin fixed and paraffin-embedded using standard protocols. RNAscope® in situ hybridization assays were performed to visualize the ceDNA vectors within the tissue using a probe specific for the ceDNA transgene and detecting using chromogenic reaction and hematoxylin staining (Advanced Cell Diagnostics). FIG. 8 shows the results, which indicate that ceDNA is present in hepatocytes.

### Example 9: Sustained Ocular Transgene Expression of ceDNA In Vivo

[0571] The sustainability of ceDNA vector transgene expression in tissues other than the liver was assessed to determine tolerability and expression of a ceDNA vector after ocular administration in vivo. While luciferase was used as an exemplary transgene in Example 9, one of ordinary skill can readily substitute the luciferase transgene with an FVIII sequence from any of those listed in Table 1.

[0572] On day 0, male Sprague Dawley rats of approximately 9 weeks of age were injected sub-retinally with 5 μL of either ceDNA vector comprising a luciferase transgene formulated with jetPEI® transfection reagent (Polyplus) or plasmid DNA encoding luciferase formulated with jetPEI®, both at a concentration of 0.25 μg/μL. Four rats were tested in each group. Animals were sedated and injected sub-retinally in the right eye with the test article using a 33-gauge needle. The left eye of each animal was untreated. Immediately after injection eyes were checked with optical coherence tomography or fundus imaging in order to confirm the presence of a subretinal bleb. Rats were treated with buprenorphine and topical antibiotic ointment according to standard procedures.

[0573] At days 7, 14, 21, 28, and 35, the animals in both groups were dosed systemically with freshly made luciferin at 150 mg/kg via intraperitoneal injection at 2.5 mL/kg. at 5-15 minutes post luciferin administration, all animals were imaged using IVIS while under isoflurane anesthesia. Total Flux [p/s] and average Flux (p/s/sr/cm²) in a region of interest encompassing the eye were obtained over 5 minutes of exposure. The results were graphed as average radiance of each treatment group in the treated eye (“injected”) relative to the average radiance of each treatment group in the untreated eye (“uninjected”) (FIG. 9B). Significant fluorescence was readily detectable in the ceDNA vector-treated eyes but much weaker in the plasmid-treated eyes (FIG. 9A). After 35 days, the plasmid-injected rats were terminated, while the study continued for the ceDNA-treated rats, with luciferin injection and IVIS imaging at days 42, 49, 56, 63, 70, and 99. The results demonstrate that ceDNA vector introduced in a single injection to rat eye mediated transgene expression in vivo and that that expression was sustained at a high level at least through 99 days after injection.

### Example 10: Sustained Dosing and Redosing of ceDNA Vector in Rag2 Mice

[0574] In situations where one or more of the transgenes encoded in the gene expression cassette of the ceDNA vector is expressed in a host environment (e.g., cell or subject) where the expressed protein is recognized as foreign, the possibility exists that the host will mount an adaptive immune response that may result in undesired depletion of the expression product, which could potentially be confused for lack of expression. In some cases, this may occur with a reporter molecule that is heterologous to the normal host environment. Accordingly, ceDNA vector transgene expression was assessed in vivo in the Rag2 mouse model which lacks B and T cells and therefore does not mount an adaptive immune response to non-native murine proteins such as luciferase. Briefly, c57bl/6 and Rag2 knockout mice were dosed intravenously via tail vein injection with 0.5 mg/kg of LNP-encapsulated ceDNA vector expressing luciferase or a polyC control at day 0, and at day 21 certain mice were redosed with the same LNP-encapsulated ceDNA vector at the same dose level. All testing groups consisted of 4 mice each. IVIS imaging was performed after luciferin injection as described in Example 9 at weekly intervals.

[0575] Comparing the total flux observed from the IVIS analyses, the fluorescence observed in the wild-type mice (an indirect measure of the presence of expressed luciferase) dosed with LNP-ceDNA vector-Luc decreased gradually after day 21 whereas the Rag2 mice administered the same treatment displayed relatively constant sustained expression of luciferase over the 42 day experiment (FIG. 10A). The approximately 21-day time point of the observed decrease in the wild-type mice corresponds to the timeframe in which an adapative immune response might expect to be produced. Re-administration of the LNP-ceDNA vector in the Rag2 mice resulted in a marked increase in expression which was sustained over the at least 21 days it was tracked in this study (FIG. 10B). The results suggest that adaptive immunity may play a role when a non-native protein is expressed from a ceDNA vector in a host, and that observed decreases in expression in the 20+ day timeframe from initial administration may signal a confounding adaptive immune response to the expressed molecule rather than (or in addition to) a decline in expression. Of note, this response is expected to be low when expressing native proteins in a host where it is anticipated that the host will properly recognize the expressed molecules as self and will not develop such an immune response.

### Example 11: Impact of Liver-Specific Expression and CpG Modulation on Sustained Expression

[0576] As described in Example 10, undesired host immune response may in some cases artificially dampen what would otherwise be sustained expression of one or more desired transgenes from an introduced ceDNA vector. Two approaches were taken to assess the impact of avoiding and/or dampening potential host immune response on sustained expression from a ceDNA vector. First, since the ceDNA-Luc vector used in the preceding examples was under the control of a constitutive CAG promoter, a similar construct was made using a liver-specific promoter (hAAT) or a different constitutive promoter (hEF-1) to see whether avoiding prolonged exposure to myeloid cells or non-liver tissue reduced any observed immune effects. Second, certain of the ceDNA-luciferase constructs were engineered to be reduced in CpG content, a known trigger for host immune reaction. ceDNA-encoded luciferase gene expression upon administration of such engineered and promoter-switched ceDNA vectors to mice was measured.

[0577] Three different ceDNA vectors were used, each encoding luciferase as the transgene. The first ceDNA vector had a high number of unmethylated CpG (˜350) and comprised the constitutive CAG promoter (“ceDNA CAG”); the second had a moderate number of unmethylated CpG (˜60) and comprised the liver-specific hAAT promoter (“ceDNA hAAT low CpG”); and the third was a methylated form of the second, such that it contained no unmethylated CpG and also comprised the hAAT promoter (“ceDNA hAAT No CpG”). The ceDNA vectors were otherwise identical. The vectors were prepared as described above.

[0578] Four groups of four male CD-1® mice, approximately 4 weeks old, were treated with one of the ceDNA vectors encapsulated in an LNP or a polyC control. On day 0 each mouse was administered a single intravenous tail vein injection of 0.5 mg/kg ceDNA vector in a volume of 5 mL/kg. Body weights were recorded on days −1, −, 1, 2, 3, 7, and weekly thereafter until the mice were terminated. Whole blood and serum samples were taken on days 0, 1, and 35. In-life imaging was performed on days 7, 14, 21, 28, and 35, and weekly thereafter using an in vivo imaging system (IVIS). For the imaging, each mouse was injected with luciferin at 150 mg/kg via intraperitoneal injection at 2.5 mL/kg. After 15 minutes, each mouse was anaesthetized and imaged. The mice were terminated at day 93 and terminal tissues collected, including liver and spleen. Cytokine measurements were taken 6 hours after dosing on day 0.

[0579] While all of the ceDNA-treated mice displayed significant fluorescence at days 7 and 14, the fluorescence decreased rapidly in the ceDNA CAG mice after day 14 and more gradually decreased for the remainder of the study. In contrast, the total flux for the ceDNA hAAT low CpG and No CpG-treated mice remained at a steady high level (FIG. 11). This suggested that directing the ceDNA vector delivery specifically to the liver resulted in sustained, durable transgene expression from the vector over at least 77 days after a single injection. Constructs that were CpG minimized or completely absent of CpG content had similar durable sustained expression profiles, while the high CpG constitutive promoter construct exhibited a decline in expression over time, suggesting that host immune activation by the ceDNA vector introduction may play a role in any decreased expression observed from such vector in a subject. These results provide alternative methods of tailoring the duration of the response to the desired level by selecting a tissue-restricted promoter and/or altering the CpG content of the ceDNA vector in the event that a host immune response is observed—a potentially transgene-specific response.

### Example 12: Hydrodynamic Delivery of ceDNA Expressing FVIII

[0580] A well-known method of introducing nucleic acid to the liver in rodents is by hydrodynamic tail vein injection. In this system, the pressurized injection in a large volume of non-encapsulated nucleic acid results in a transient increase in cell permeability and delivery directly into tissues and cells. This provides an experimental mechanism to bypass many of the host immune systems, such as macrophage delivery, providing the opportunity to observe delivery and expression in the absence of such activity.

[0581] Three different ceDNA vectors, each with a wild-type left ITR and a truncation mutant right ITR and having a transgene region encoding FVIII, were prepared and purified as described above in Examples 1 and 5. ceDNA FVIII vectors under the control of a liver-specific promoter or PBS alone were administered to male C57bl/6J mice of approximately 6 weeks of age. The naked ceDNA vectors were dosed at 0.005 mg per animal (4 animals per group) by hydrodynamic intravenous injection via lateral tail vein in a volume of either 1.2 mL administered over 5 seconds or at a dose of 100 mL/kg administered over 5-8 seconds. Body weights were measured on days 0, 1, 2, 3 and 7 and weekly thereafter. Blood samples were collected from each treated animal on days 3, 7, 14, 21, and at terminal day 28. The presence of expressed FVIII in the plasma samples was measured by the Human Total Factor VIII ELISA kit (Innovative Research).

[0582] As shown in FIG. 11A, FVIII was readily detected in day 3 and 7 plasma samples from mice treated with two of the three ceDNA FVIII vectors, but was not observed in mice treated with PBS. FIG. 11B shows that FVIII expression was dose-volume dependent in the two vectors where FVIII expression was observed, and remained relatively constant over the 28-day study with the exception of vector 3, which decreased rapidly in expression after day 7. This experiment demonstrated that ceDNA vectors were able to express FVIII from the liver after hydrodynamic injection, and that FVIII was rapidly and readily detectable in the serum after ceDNA administration.

### Example 13: Hydrodynamic Delivery of ceDNA Expressing FVIII—Testing of Various ceDNA Vectors Expressing FVIII

[0583] A hydrodynamic delivery system as described in Example 12 was used to test the effect of various ceDNA vectors expressing FVIII on serum FVIII levels, where detection of FVIII in the serum indicated that the ceDNA vector was able to express FVIII after injection.

[0584] ceDNA vectors as described in Example 12 were prepared. Each of the ceDNA FVIII vectors (alone, without any LNP encapsulation) and the control were administered by hydrodynamic intravenous (IV) route of injection to C57BL/6 mice. The ceDNA vectors were dosed at 5 μg per animal (4 animals per group) by hydrodynamic intravenous injection via lateral tail vein in a volume of 90-100 mg/mL. The terminal timepoint was day 7. Vehicle alone was used as control.

[0585] The following ceDNA vectors were tested in three separate experiments. Sequences for the below ceDNA vectors are shown in Table 9. In Table 9, the open reading frame is shown by underlining. The promoter is shown in bold.
[0586] (1) ceDNAFVIII-vector 4, ceDNAFVIII-vector 6, ceDNAFVIII-vector 12, ceDNAFVIII-vector 14, ceDNAFVIII-vector 16, ceDNAFVIII-vector 18, ceDNAFVIII-vector 19, ceDNAFVIII-vector 21, ceDNAFVIII-vector 22;
[0587] (2) ceDNAFVIII-vector 1, ceDNAFVIII-vector 2, ceDNAFVIII-vector 3, ceDNAFVIII-vector 5, ceDNAFVIII-vector 7, ceDNAFVIII-vector 8, ceDNAFVIII-vector 12, ceDNAFVIII-vector 13, ceDNAFVIII-vector 15;
[0588] (3) ceDNAFVIII-vector 9, ceDNAFVIII-vector 10, ceDNAFVIII-vector 11, ceDNAFVIII-vector 12, ceDNAFVIII-vector 17, ceDNAFVIII-vector 20, ceDNAFVIII-vector 24, ceDNAFVIII-vector 25, ceDNAFVIII-vector 26.

TABLE 9

| ceDNA Vector | |
|---|---|
| Name | Nucleic Acid Sequence |
| ceDNAFVIII- | GACGCGCCCTGTAGCGGCGCATTAAGCGCGGCGGGTGTGGTGGTTACGCGCAGCGTGACCGCTACACTTGCCAGCGCCCTAGCGCCCGCTCCTTTCGC |
| vector 1 | TTTCTTCCCTTCCTTTCTCGCCACGTTCGCCGGCTTTCCCCGTCAAGCTCTAAATCGGGGGCTCCCTTTAGGGTTCCGATTTAGTGCTTTACGGCACC |
| (SEQ ID NO: | TCGACCCCAAAAAACTTGATTAGGGTGATGGTTCACGTAGTGGGCCATCGCCCTGATAGACGGTTTTTCGCCCTTTGACGTTGGAGTCCACGTTCTTT |
| 192) | AATAGTGGACTCTTGTTCCAAACTGGAACAACACTCAACCCTATCTCGGTCTATTCTTTTGATTTATAAGGGATTTTGCCGATTTCGGCCTATTGGTT |
| | AAAAAATGAGCTGATTTAACAAAAATTTAACGCGAATTTTAACAAAATATTAACGTTTACAATTTCAGGTGGCACTTTTCGGGGAAATGTGCGCGGAA |
| | CCCCTATTTGTTTATTTTTCTAAATACATTCAAATATGTATCCGCTCATGAGACAATAACCCTGATAAATGCTTCAATAATATTGAAAAAGGAAGAGT |
| | ATGAGTATTCAACATTTCCGTGTCGCCCTTATTCCCTTTTTTGCGGCATTTTGCCTTCCTGTTTTTGCTCACCCAGAAACGCTGGTGAAAGTAAAAGA |
| | TGCTGAAGATCAGTTGGGTGCACGAGTGGGTTACATCGAACTGGATCTCAACAGCGGTAAGATCCTTGAGAGTTTTCGCCCCGAAGAACGTTTTCCAA |
| | TGATGAGCACTTTTAAAGTTCTGCTATGTGGCGCGGTATTATCCCGTATTGACGCCGGGCAAGAGCAACTCGGTCGCCGCATACACTATTCTCAGAAT |
| | GACTTGGTTGAGTACTCACCAGTCACAGAAAAGCATCTTACGGATGGCATGACAGTAAGAGAATTATGCAGTGCTGCCATAACCATGAGTGATAACAC |
| | TGCGGCCAACTTACTTCTGACAACGATCGGAGGACCGAAGGAGCTAACCGCTTTTTTGCACAACATGGGGGATCATGTAACTCGCCTTGATCGTTGGG |
| | AACCGGAGCTGAATGAAGCCATACCAAACGACGAGCGTGACACCACGATGCCTGTAGCAATGGCAACAACGTTGCGCAAACTATTAACTGGCGAACTA |
| | CTTACTCTAGCTTCCCGGCAACAATTAATAGACTGGATGGAGGCGGATAAAGTTGCAGGACCACTTCTGCGCTCGGCCCTTCCGGCTGGCTGGTTTAT |
| | TGCTGATAAATCTGGAGCCGGTGAGCGTGGGTCTCGCGGTATCATTGCAGCACTGGGGCCAGATGGTAAGCCCTCCCGTATCGTAGTTATCTACACGA |
| | CGGGGAGTCAGGCAACTATGGATGAACGAAATAGACAGATCGCTGAGATAGGTGCCTCACTGATTAAGCATTGGTAACTGTCAGACCAAGTTTACTCA |
| | TATATACTTTAGATTGATTTAAAACTTCATTTTTAATTTAAAAGGATCTAGGTGAAGATCCTTTTTGATAATCTCATGACCAAAATCCCTTAACGTGA |
| | GTTTTCGTTCCACTGAGCGTCAGACCCCGTAGAAAAGATCAAAGGATCTTCTTGAGATCCTTTTTTTCTGCGCGTAATCTGCTGCTTGCAAACAAAAA |
| | AACCACCGCTACCAGCGGTGGTTTGTTTGCCGGATCAAGAGCTACCAACTCTTTTTCCGAAGGTAACTGGCTTCAGCAGAGCGCAGATACCAAATACT |
| | GTCCTTCTAGTGTAGCCGTAGTTAGGCCACCACTTCAAGAACTCTGTAGCACCGCCTACATACCTCGCTCTGCTAATCCTGTTACCAGTGGCTGCTGC |
| | CAGTGGCGATAAGTCGTGTCTTACCGGGTTGGACTCAAGACGATAGTTACCGGATAAGGCGCAGCGGTCGGGCTGAACGGGGGGTTCGTGCACACAGC |
| | CCAGCTTGGAGCGAACGACCTACACCGAACTGAGATACCTACAGCGTGAGCATTGAGAAAGCGCCACGCTTCCCGAAGGGAGAAAGGCGGACAGGTAT |
| | CCGGTAAGCGGCAGGGTCGGAACAGGAGAGCGCACGAGGGAGCTTCCAGGGGGAAACGCCTGGTATCTTTATAGTCCTGTCGGGTTTCGCCACCTCTG |
| | ACTTGAGCGTCGATTTTTGTGATGCTCGTCAGGGGGGCGGAGCCTATGGAAAAACGCCAGCAACGCGGCCTTTTTACGGTTCCTGGCCTTTTGCTGGC |
| | CTTTTGCTCACATGTTCTTTCCTGCGTTATCCCCTGATTCTGTGGATAACCGTATTACCGCCTTTGAGTGAGCTGATACCGCTCGCCGCAGCCGAACG |
| | ACCGAGCGCAGCGAGTCAGTGAGCGAGGAAGCGGAAGAGCGCCTGATGCGGTATTTTCTCCTTACGCATCTGTGCGGTATTTCACACCGCAGACCAGC |
| | CGCGTAACCTGGCAAAATCGGTTACGGTTGAGTAATAAATGGATGCCCTGCGTAAGCGGGTGTGGGCGGACAATAAAGTCTTAAACTGAACAAAATAG |
| | ATCTAAACTATGACAATAAAGTCTTAAACTAGACAGAATAGTTGTAAACTGAAATCAGTCCAGTTATGCTGTGAAAAAGCATACTGGACTTTTGTTAT |
| | GGCTAAAGCAAACTCTTCATTTTCTGAAGTGCAAATTGCCCGTCGTATTAAAGAGGGGCGTGGCCAAGGGCATGGTAAAGACTATATTCGCGGCGTTG |
| | TGACAATTTACCGAACAACTCCGCGGCCGGGAAGCCGATCTCGGCTTGAACGAATTGTTAGGTGGCGGTACTTGGGTCGATATCAAAGTGCATCACTT |
| | CTTCCCGTATGCCCAACTTTGTATAGAGAGCCACTGCGGGATCGTCACCGTAATCTGCTTGCACGTAGATCACATAAGCACCAAGCGCGTTGGCCTCA |
| | TGCTTGAGGAGATTGATGAGCGCGGTGGCAATGCCCTGCCTCCGGTGCTCGCCGGAGACTGCGAGATCATAGATATAGATCTCACTACGCGGCTGCTC |
| | AAACCTGGGCAGAACGTAAGCCGCGAGAGCGCCAACAACCGCTTCTTGGTCGAAGGCAGCAAGCGCGATGAATGTCTTACTACGGAGCAAGTTCCCGA |
| | GGTAATCGGAGTCCGGCTGATGTTGGGAGTAGGTGGCTACGTCTCCGAACTCACGACCGAAAAGATCAAGAGCAGCCCGCATGGATTTGACTTGGTCA |
| | GGGCCGAGCCTACATGTGCGAATGATGCCCATACTTGAGCCACCTAACTTTGTTTTAGGGCGACTGCCCTGCTGCGTAACATCGTTGCTGCTGCGTAA |
| | CATCGTTGCTGCTCCATAACATCAAACATCGACCCACGGCGTAACGCGCTTGCTGCTTGGATGCCCGAGGCATAGACTGTACAAAAAAACAGTCATAA |
| | CAAGCCATGAAAACCGCCACTGCGCCGTTACCACCGCTGCGTTCGGTCAAGGTTCTGGACCAGTTGCGTGAGCGCATACGCTACTTGCATTACAGTTT |
| | ACGAACCGAACAGGCTTATGTCAACTGGGTTCGTGCCTTCATCCGTTTCCACGGTGTGCGTCACCCGGCAACCTTGGGCAGCAGCGAAGTCGAGGCAT |
| | TTCTGTCCTGGCTGGCGAACGAGCGCAAGGTTTCGGTCTCCACGCATCGTCAGGCATTGGCGGCCTTGCTGTTCTTCTACGGCAAGGTGCTGTGCACG |
| | GATCTGCCCTGGCTTCAGGAGATCGGAAGACCTCGGCCGTCGCGGCGCTTGCCGGTGGTGCTGACCCCGGATGAAGTGGTTCGCATCCTCGGTTTTCT |
| | GGAAGGCGAGCATCGTTTGTTCGCCCAGGACTCTAGCTATAGTTCTAGTGGTTGGCTACGTATACTCCGGAATATTAATAGATCATGGAGATAATTAA |
| | AATGATAACCATCTCGCAAATAAATAAGTATTTTACTGTTTTCGTAACAGTTTTGTAATAAAAAAACCTATAAATATTCCGGATTATTCATACCGTCC |
| | CACCATCGGGCGCGGATCTCGGTCCGAAACCATGTCGTACTACCATCACCATCACCATCACGATTACGATATCCCAACGACCGAAAACCTGTATTTTC |
| | AGGGCGCCATGGGATCCGGCCGGCCCCTGCAGGCAGCTGCGCGCTCGCTCGCTCACTGAGGCCGCCCGGGCAAAGCCCGGGCGTCGGGCGACCTTTGG |
| | TCGCCCGGCCTCAGTGAGCGAGCGAGCGCGCAGAGAGGGAGTGGCCAACTCCATCACTAGGGGTTCCTTGTAGTTAATGATTAACCCGCCATGCTACT |
| | TATCTACGTAGCCATGCTCTAGAGCGGCCGCAGGCTCAGAGGCACACAGGAGTTTCTGGGCTCACCCTGCCCCCTTCCAACCCCTCAGTTCCCATCCT |
| | CCAGCAGCTGTTTGTGTGCTGCCTCTGAAGTCCACACTGAACAAACTTCAGCCTACTCATGTCCCTAAAATGGGCAAACATTGCAAGCAGCAAACAGC |
| | AAACACACAGCCCTCCCTGCCTGCTGACCTTGGAGCTGGGGCAGAGGTCAGAGACCTCTCTGGGCCCATGCCACCTCCAACATCCACTCGACCCCTTG |
| | GAATTTCGGTGGAGAGGAGCAGAGGTTGTCCTGGCGTGGTTTAGGTAGTGTGAGAGGGTCCGGGTTCAAAACCACTTGCTGGGTGGGGAGTCGTCAGT |
| | AAGTGGCTATGCCCCGACCCCGAAGCCTGTTTCCCCATCTGTACAATGGAAATGATAAAGACGCCCATCTGATAGGGTTTTTGTGGCAAATAAACATT |
| | TGGTTTTTTTGTTTTGTTTTGTTTTGTTTTTTGAGATGGAGGTTTGCTCTGTCGCCCAGGCTGGAGTGCAGTGACACAATCTCATCTCACCACAACCT |
| | TCCCCTGCCTCAGCCTCCCAAGTAGCTGGGATTACAAGCATGTGCCACCACACCTGGCTAATTTTCTATTTTTAGTAGAGACGGGTTTCTCCATGTTG |
| | GTCAGCCTCAGCCTCCCAAGTAACTGGGATTACAGGCCTGTGCCACCACACCCGGCTAATTTTTTCTATTTTTGACAGGGACGGGGTTTCACCATGTT |
| | GGTCAGGCTGGTCTAGAGGTACCGGATCTTGCTACCAGTGGAACAGCCACTAAGGATTCTGCAGTGAGAGCAGAGGGCCAGCTAAGTGGTACTCTCCC |
| | AGAGACTGTCTGACTCACGCCACCCCCTCCACCTTGGACACAGGACGCTGTGGTTTCTGAGCCAGGTACAATGACTCCTTTCGGTAAGTGCAGTGGAA |
| | GCTGTACACTGCCCAGGCAAAGCGTCCGGGCAGCGTAGGCGGGCGACTCAGATCCCAGCCAGTGGACTTAGCCCCTGTTTGCTCCTCCGATAACTGGG |
| | GTGACCTTGGTTAATATTCACCAGCAGCCTCCCCCGTTGCCCCTCTGGATCCACTGCTTAAATACGGACGAGGACAGGGCCCTGTCTCCTCAGCTTCA |
| | GGCACCACCACTGACCTGGGACAGTGAATCCGGACTCTAAGGTAAATATAAAATTTTTAAGTGTATAATGTGTTAAACTACTGATTCTAATTGTTTCT |
| | CTCTTTTAGATTCCAACCTTTGGAACTGAGTTTAAACCGCAGCCACCATGCAGATCGAGCTGTCTACCTGCTTCTTCCTGTGCCTGCTGCGGTTCTGC |
| | TTCAGCGCCACCAGAAGATATTACCTGGGCGCCGTGGAACTGAGCTGGGACTACATGCAGTCTGACCTGGGAGAGCTGCCCGTGGACGCTAGATTTCC |
| | TCCAAGAGTGCCCAAGAGCTTCCCCTTCAACACCTCCGTGGTGTACAAGAAAACCCTGTTCGTGGAATTCACCGACCACCTGTTCAATATCGCCAAGC |
| | CTCGGCCTCCTTGGATGGGACTGCTGGGACCTACAATTCAGGCCGAGGTGTACGACACCGTGGTCATCACCCTGAAGAACATGGCCAGCCATCCTGTG |
| | TCTCTGCACGCCGTGGGAGTGTCTTATTGGAAGGCTTCTGAGGGCGCCGAGTACGACGATCAGACAAGCCAGAGAGAGAAAGAGGACGACAAGGTTTT |
| | CCCTGGCGGCAGCCACACCTATGTCTGGCAGGTCCTGAAAGAAAACGGCCCTATGGCCTCCGATCCTCTGTGCCTGACATACAGCTACCTGAGCCACG |
| | TGGACCTGGTCAAGGACCTGAATTCTGGCCTGATCGGAGCCCTGCTCGTGTGTAGAGAAGGCAGCCTGGCCAAAGAGAAAACCCAGACACTGCACAAG |
| | TTCATCCTGCTGTTCGCCGTGTTCGACGAGGGCAAGAGCTGGCACAGCGAGACAAAGAACAGCCTGATGCAGGACAGGGATGCCGCCTCTGCTAGAGC |
| | TTGGCCTAAGATGCACACCGTGAACGGCTACGTGAACAGAAGCCTGCCTGGACTGATCGGCTGCCACAGAAAGTCCGTGTACTGGCACGTGATCGGCA |
| | TGGGCACAACACCTGAGGTGCACAGCATCTTTCTGGAAGGCCACACCTTCCTCGTGCGGAACCACAGACAGGCCAGCCTGGAAATCAGCCCTATCACC |
| | TTCCTGACCGCTCAGACCCTGCTGATGGATCTGGGCCAGTTTCTGCTGTTCTGCCACATCAGCTCCCACCAGCACGATGGCATGGAAGCCTACGTGAA |
| | GGTGGACAGCTGCCCCGAAGAACCCCAGCTGCGGATGAAGAACAACGAGGAAGCCGAGGACTACGACGACGACCTGACCGACTCTGAGATGGACGTCG |
| | TCAGATTCGACGACGATAACAGCCCCAGCTTCATCCAGATCAGAAGCGTGGCCAAGAAGCACCCCAAGACCTGGGTGCACTATATCGCCGCCGAGGAA |
| | GAGGACTGGGATTACGCTCCTCTGGTGCTGGCCCCTGACGACAGAAGCTACAAGAGCCAGTACCTGAACAACGGCCCTCAGCGGATCGGCCGGAAGTA |
| | TAAGAAAGTGCGGTTCATGGCCTACACCGACGAGACATTCAAGACCAGAGAGGCCATCCAGCACGAGAGCGGAATTCTGGGCCCTCTGCTGTATGGCG |
| | AAGTGGGCGATACACTGCTGATCATCTTCAAGAACCAGGCCAGCAGACCCTACAACATCTACCCTCACGGCATCACCGATGTGCGGCCCCTGTATTCT |
| | AGAAGGCTGCCCAAGGGCGTGAAGCACCTGAAGGACTTCCCTATCCTGCCTGGCGAGATTTTCAAGTACAAGTGGACCGTGACCGTGGAAGATGGCCC |
| | CACCAAGAGCGACCCTAGATGTCTGACACGGTACTACAGCAGCTTCGTGAACATGGAACGCGACCTGGCCAGCGGCCTGATTGGACCTCTGCTGATCT |
| | GCTACAAAGAAAGCGTGGACCAGCGGGGCAACCAGATCATGAGCGACAAGCGGAACGTGATCCTGTTTAGCGTGTTCGATGAGAACCGGTCCTGGTAT |
| | CTGACCGAGAACATCCAGCGGTTTCTGCCCAATCCTGCCGGGGTGCAACTGGAAGATCCTGAGTTCCAGGCAAGCAACATCATGCACTCCATCAATGG |
| | CTATGTGTTCGACAGCCTGCAGCTGAGCGTGTGCCTGCACGAAGTGGCCTACTGGTACATCCTGAGCATTGGCGCCCAGACCGACTTCCTGTCCGTGT |
| | TCTTTAGCGGCTACACCTTCAAGCACAAGATGGTGTACGAGGATACCCTGACACTGTTCCCATTCAGCGGCGAGACAGTGTTCATGAGCATGGAAAAC |
| | CCCGGCCTGTGGATTCTGGGCTGTCACAACAGCGACTTCCGGAACAGAGGCATGACAGCCCTGCTGAAGGTGTCCAGCTGCGACAAGAACACCGGCGA |
| | CTACTACGAGGACAGCTATGAGGACATCAGCGCCTACCTGCTGAGCAAGAACAATGCCATCGAGCCCAGAAGCTTCAGCCAGAATAGCAGACACCCCT |
| | CCACCAGACAGAAGCAGTTCAACGCCACAACAATCCCCGAGAACGACATCGAGAAAACCGATCCTTGGTTTGCCCACAGAACCCCTATGCCTAAGATC |
| | CAGAACGTGTCCTCCAGCGATCTGCTGATGCTCCTGAGACAGAGCCCTACACCTCACGGACTGAGCCTGTCCGATCTGCAAGAGGCCAAATACGAAAC |
| | CTTCAGCGACGACCCTTCTCCTGGCGCCATCGACAGCAACAATAGCCTGAGCGAGATGACCCACTTCAGACCACAGCTGCACCACAGCGGCGACATGG |
| | TGTTTACACCTGAGAGCGGCCTCCAGCTGAGACTGAATGAGAAGCTGGGAACCACCGCCGCCACCGAGCTGAAGAAACTGGACTTCAAGGTGTCCTCT |
| | ACCAGCAACAACCTGATCAGCACAATCCCCTCCGACAACCTGGCTGCCGGCACCGACAACACATCTTCTCTGGGCCCACCTAGCATGCCCGTGCACTA |
| | CGATAGCCAGCTGGATACCACACTGTTCGGCAAGAAGTCTAGCCCTCTGACAGAGTCTGGCGGCCCTCTGTCTCTGAGCGAGGAAAACAACGACAGCA |
| | AGCTGCTGGAATCCGGCCTGATGAACAGCCAAGAGTCCTCCTGGGGCAAGAATGTGTCCAGCACCGAGTCCGGCAGACTGTTCAAGGGAAAGAGAGCC |
| | CACGGACCTGCTCTGCTGACCAAGGATAACGCCCTGTTCAAAGTGTCCATCAGCCTGCTCAAGACCAACAAGACCTCCAACAACTCCGCCACCAACAG |
| | AAAGACCCACATCGACGGCCCTAGCCTGCTGATCGAGAATAGCCCTAGCGTCTGGCAGAATATCCTGGAAAGCGACACCGAGTTCAAGAAAGTGACCC |
| | CTCTGATCCACGACCGGATGCTCATGGACAAGAACGCCACCGCTCTGCGGCTGAACCACATGAGCAACAAGACAACCAGCAGCAAGAATATGGAAATG |
| | GTGCAGCAGAAGAAAGAGGGCCCCATTCCTCCAGACGCTCAGAACCCCGATATGAGCTTCTTCAAGATGCTCTTTCTGCCCGAGAGCGCCCGGTGGAT |
| | TCAGAGAACACACGGCAAGAACTCCCTGAACTCCGGCCAGGGACCTTCTCCAAAGCAGCTGGTTTCCCTGGGACCTGAGAAGTCCGTGGAAGGACAGA |
| | ACTTCCTGAGCGAAAAGAACAAAGTGGTCGTCGGCAAGGGCGAGTTCACCAAGGATGTGGGCCTGAAAGAGATGGTCTTTCCCAGCAGCCGGAACCTG |
| | TTCCTGACCAACCTGGACAACCTGCACGAGAACAACACCCACAATCAAGAGAAGAAGATCCAAGAGGAAATCGAAAAGAAAGAGACACTCATCCAAGA |
| | GAACGTGGTGCTGCCTCAGATCCACACAGTGACCGGCACCAAGAACTTTATGAAGAATCTGTTCCTGCTGAGTACCCGGCAGAACGTGGAAGGCAGCT |
| | ACGATGGCGCTTATGCCCCTGTGCTGCAGGACTTCAGATCCCTGAACGACTCCACCAATCGGACAAAGAAGCACACAGCCCACTTCTCCAAGAAGGGC |
| | GAAGAAGAGAACCTGGAAGGACTGGGCAATCAGACCAAGCAGATCGTCGAGAAGTACGCCTGCACCACCAGAATCAGCCCCAACACAAGCCAGCAGAA |
| | CTTCGTGACCCAGCGGAGCAAAAGAGCCCTGAAGCAGTTTCGGCTGCCCCTGGAAGAAACCGAGCTGGAAAAGCGGATCATCGTGGACGACACCAGCA |
| | CACAGTGGTCCAAGAACATGAAGCACTTGACCCCTAGCACACTGACCCAGATCGACTACAACGAGAAAGAGAAGGGCGCTATCACACAGAGCCCACTG |
| | AGCGACTGTCTGACCAGAAGCCACAGCATCCCTCAGGCCAACAGATCCCCTCTGCCAATCGCCAAAGTGTCTAGCTTCCCCAGCATCAGACCCATCTA |
| | CCTGACCAGAGTGCTGTTCCAGGACAACAGCAGCCATCTGCCAGCCGCCAGCTACCGGAAGAAAGATTCTGGCGTGCAAGAGAGCAGCCACTTTCTGC |
| | AGGGCGCTAAGAAGAACAATCTGAGCCTGGCTATTCTGACCCTGGAAATGACCGGCGATCAGAGAGAAGTCGGCTCTCTGGGCACCAGCGCCACAAAT |
| | AGCGTGACCTACAAAAAGGTGGAAAACACCGTGCTGCCTAAGCCTGACCTGCCAAAGACAAGCGGCAAGGTGGAACTGCTGCCAAAGGTGCACATCTA |
| | CCAGAAGGACCTGTTTCCTACCGAGACAAGCAACGGCTCTCCCGGCCATCTGGATCTGGTGGAAGGATCTCTGCTGCAGGGAACCGAGGGCGCCATCA |
| | AGTGGAACGAGGCCAATAGACCTGGCAAGGTGCCCTTCCTGAGAGTGGCCACAGAGTCCAGCGCCAAGACACCCTCTAAACTGCTGGACCCTCTGGCC |
| | TGGGACAACCACTATGGCACTCAGATCCCCAAAGAGGAATGGAAGTCCCAAGAGAAGTCCCCTGAAAAGACCGCCTTCAAGAAGAAGGACACCATTCT |
| | GTCCCTGAATGCCTGCGAGAGCAACCACGCCATTGCCGCCATCAATGAGGGCCAGAACAAGCCCGAGATCGAAGTGACCTGGGCCAAGCAGGGAAGAA |
| | CCGAGAGACTGTGTAGCCAGAATCCTCCTGTGCTGAAGCGGCACCAGAGAGAAATCACCCGGACCACACTGCAGAGCGACCAAGAAGAGATCGATTAC |
| | GACGATACCATCAGCGTCGAGATGAAGAAAGAAGATTTCGACATCTACGACGAGGACGAGAATCAGAGCCCTCGGAGCTTCCAGAAGAAAACCAGGCA |
| | CTACTTTATTGCCGCCGTCGAGCGGCTGTGGGACTACGGAATGTCTAGCTCTCCTCACGTGCTGCGGAATAGAGCCCAGTCTGGTAGCGTGCCCCAGT |
| | TCAAAAAGGTCGTGTTCCAAGAGTTCACCGACGGCAGCTTCACCCAGCCACTGTATAGAGGCGAGCTGAACGAGCATCTGGGCCTGCTGGGCCCTTAT |
| | ATCAGAGCCGAAGTGGAAGATAACATCATGGTCACCTTCCGGAATCAGGCTAGCCGGCCTTACAGCTTCTACAGCTCCCTGATCTCCTACGAAGAGGA |
| | CCAGAGACAGGGCGCAGAGCCCCGGAAGAATTTCGTGAAGCCCAACGAGACTAAGACCTACTTTTGGAAGGTGCAGCACCATATGGCCCCTACAAAGG |
| | ACGAGTTCGACTGCAAAGCCTGGGCCTACTTCTCCGATGTGGACCTCGAAAAGGACGTGCACAGCGGACTCATCGGCCCACTGCTTGTGTGCCACACC |
| | AACACACTGAACCCCGCTCACGGCAGACAAGTGACAGTGCAAGAGTTCGCCCTGTTTTTCACCATCTTCGACGAAACGAAGTCCTGGTACTTCACCGA |
| | AAACATGGAAAGAAACTGCAGGGCCCCTTGCAACATTCAGATGGAAGATCCCACCTTCAAAGAGAACTACCGGTTCCACGCCATCAACGGCTACATCA |
| | TGGACACACTGCCCGGCCTGGTTATGGCCCAGGATCAGAGAATCCGGTGGTATCTGCTGTCCATGGGCTCCAACGAGAATATCCACTCCATCCACTTC |
| | AGCGGCCACGTGTTCACCGTGCGGAAAAAAGAAGAGTACAAAATGGCCCTGTACAATCTGTACCCTGGGGTGTTCGAAACCGTTGAGATGCTGCCTAG |
| | CAAGGCCGGAATTTGGAGAGTGGAATGTCTGATTGGAGAGCACCTCCACGCCGGGATGAGCACCCTGTTTCTGGTGTACTCCAACAAGTGTCAGACCC |
| | CTCTCGGCATGGCCTCTGGCCACATTAGAGACTTCCAGATCACCGCCAGCGGACAGTATGGACAGTGGGCCCCTAAACTGGCCAGACTGCACTACTCC |
| | GGCAGCATCAATGCCTGGTCCACCAAAGAGCCTTTCAGCTGGATCAAAGTGGACCTGCTGGCTCCCATGATCATCCACGGAATCAAGACCCAGGGCGC |
| | CAGACAAAAGTTCAGCAGCCTGTACATCAGCCAGTTCATCATCATGTACAGCCTGGACGGAAAGAAGTGGCAGACCTACCGGGGCAATAGCACCGGCA |
| | CACTGATGGTGTTCTTCGGCAACGTGGACTCCAGCGGCATTAAGCACAACATCTTCAACCCTCCAATCATTGCCCGGTACATCCGGCTGCACCCCACA |
| | CACTACAGCATCAGGTCTACCCTGAGAATGGAACTGATGGGCTGCGACCTGAACAGCTGCTCTATGCCCCTCGGAATGGAAAGCAAGGCCATCAGCGA |
| | CGCCCAGATCACAGCCTCTAGCTACTTCACCAACATGTTCGCCACTTGGAGCCCCTCTAAGGCCCGGCTTCATCTGCAAGGCAGAAGCAACGCTTGGA |
| | GGCCCCAAGTGAACAACCCCAAAGAATGGCTCCAGGTGGACTTTCAGAAAACCATGAAAGTGACAGGCGTGACCACACAGGGCGTCAAGTCCCTGCTG |
| | ACCTCTATGTACGTGAAAGAGTTTCTGATCAGCTCCAGCCAGGACGGCCACCAGTGGACCCTGTTCTTCCAGAACGGCAAAGTGAAAGTGTTCCAGGG |
| | AAATCAGGACAGCTTCACACCCGTGGTCAATAGTCTGGACCCACCACTGCTGACCCGCTACCTGCGAATTCACCCTCAGTCTTGGGTGCACCAGATTG |
| | CCCTGCGGATGGAAGTGCTGGGCTGTGAAGCTCAGGACCTCTACTAGTTAATTAAGAGCATCTTACCGCCATTTATTCCCATATTTGTTCTGTTTTTC |
| | TTGATTTGGGTATACATTTAAATGTTAATAAAACAAAATGGTGGGGCAATCATTTACATTTTTAGGGATATGTAATTACTAGTTCAGGTGTATTGCCA |
| | CAAGACAAACATGTTAAGAAACTTTCCCGTTATTTACGCTCTGTTCCTGTTAATCAACCTCTGGATTACAAAATTTGTGAAAGATTGACTGATATTCT |
| | TAACTATGTTGCTCCTTTTACGCTGTGTGGATATGCTGCTTTATAGCCTCTGTATCTAGCTATTGCTTCCCGTACGGCTTTCGTTTTCTCCTCCTTGT |
| | ATAAATCCTGGTTGCTGTCTCTTTTAGAGGAGTTGTGGCCCGTTGTCCGTCAACGTGGCGTGGTGTGCTCTGTGTTTGCTGACGCAACCCCCACTGGC |
| | TGGGGCATTGCCACCACCTGTCAACTCCTTTCTGGGACTTTCGCTTTCCCCCTCCCGATCGCCACGGCAGAACTCATCGCCGCCTGCCTTGCCCGCTG |
| | CTGGACAGGGGCTAGGTTGCTGGGCACTGATAATTCCGTGGTGTTGTCTGTGCCTTCTAGTTGCCAGCCATCTGTTGTTTGCCCCTCCCCCGTGCCTT |
| | CCTTGACCCTGGAAGGTGCCACTCCCACTGTCCTTTCCTAATAAAATGAGGAAATTGCATCGCATTGTCTGAGTAGGTGTCATTCTATTCTGGGGGGT |
| | GGGGTGGGGCAGGACAGCAAGGGGGAGGATTGGGAAGACAATAGCAGGCATGCTGGGGATGCGGTGGGCTCTATGGCTCTAGAGCATGGCTACGTAGA |
| | TAAGTAGCATGGCGGGTTAATCATTAACTACACCTGCAGGAGGAACCCCTAGTGATGGAGTTGGCCACTCCCTCTCTGCGCGCTCGCTCGCTCACTGA |
| | GGCCGGGCGACCAAAGGTCGCCCGACGCCCGGGCGGCCTCAGTGAGCGAGCGAGCGCGCAGCTGCCTGCAGGGGCGCGCCTCGAGGCATGCGGTACCA |
| | AGCTTGTCGAGAAGTACTAGAGGATCATAATCAGCCATACCACATTTGTAGAGGTTTTACTTGCTTTAAAAAACCTCCCACACCTCCCCCTGAACCTG |
| | AAACATAAAATGAATGCAATTGTTGTTGTTAACTTGTTTATTGCAGCTTATAATGGTTACAAATAAAGCAATAGCATCACAAATTTCACAAATAAAGC |
| | ATTTTTTTCACTGCATTCTAGTTGTGGTTTGTCCAAACTCATCAATGTATCTTATCATGTCTGGATCTGATCACTGATATCGCCTAGGAGATCCGAAC |
| | CAGATAAGTGAAATCTAGTTCCAAACTATTTTGTCATTTTTAATTTTCGTATTAGCTTACGACGCTACACCCAGTTCCCATCTATTTTGTCACTCTTC |
| | CCTAAATAATCCTTAAAAACTCCATTTCCACCCCTCCCAGTTCCCAACTATTTTGTCCGCCCACAGCGGGGCATTTTTCTTCCTGTTATGTTTTTAAT |
| | CAAACATCCTGCCAACTCCATGTGACAAACCGTCATCTTCGGCTACTTTTTCTCTGTCACAGAATGAAAATTTTTCTGTCATCTCTTCGTTATTAATG |
| | TTTGTAATTGACTGAATATCAACGCTTATTTGCAGCCTGAATGGCGAATGG |
| ceDNAFVIII- | GACGCGCCCTGTAGCGGCGCATTAAGCGCGGCGGGTGTGGTGGTTACGCGCAGCGTGACCGCTACACTTGCCAGCGCCCTAGCGCCCGCTCCTTTCGC |
| vector 2 | TTTCTTCCCTTCCTTTCTCGCCACGTTCGCCGGCTTTCCCCGTCAAGCTCTAAATCGGGGGCTCCCTTTAGGGTTCCGATTTAGTGCTTTACGGCACC |
| (SEQ ID NO: | TCGACCCCAAAAAACTTGATTAGGGTGATGGTTCACGTAGTGGGCCATCGCCCTGATAGACGGTTTTTCGCCCTTTGACGTTGGAGTCCACGTTCTTT |
| 193) | AATAGTGGACTCTTGTTCCAAACTGGAACAACACTCAACCCTATCTCGGTCTATTCTTTTGATTTATAAGGGATTTTGCCGATTTCGGCCTATTGGTT |
| | AAAAAATGAGCTGATTTAACAAAAATTTAACGCGAATTTTAACAAAATATTAACGTTTACAATTTCAGGTGGCACTTTTCGGGGAAATGTGCGCGGAA |
| | CCCCTATTTGTTTATTTTTCTAAATACATTCAAATATGTATCCGCTCATGAGACAATAACCCTGATAAATGCTTCAATAATATTGAAAAAGGAAGAGT |
| | ATGAGTATTCAACATTTCCGTGTCGCCCTTATTCCCTTTTTTGCGGCATTTTGCCTTCCTGTTTTTGCTCACCCAGAAACGCTGGTGAAAGTAAAAGA |
| | TGCTGAAGATCAGTTGGGTGCACGAGTGGGTTACATCGAACTGGATCTCAACAGCGGTAAGATCCTTGAGAGTTTTCGCCCCGAAGAACGTTTTCCAA |
| | TGATGAGCACTTTTAAAGTTCTGCTATGTGGCGCGGTATTATCCCGTATTGACGCCGGGCAAGAGCAACTCGGTCGCCGCATACACTATTCTCAGAAT |
| | GACTTGGTTGAGTACTCACCAGTCACAGAAAAGCATCTTACGGATGGCATGACAGTAAGAGAATTATGCAGTGCTGCCATAACCATGAGTGATAACAC |
| | TGCGGCCAACTTACTTCTGACAACGATCGGAGGACCGAAGGAGCTAACCGCTTTTTTGCACAACATGGGGGATCATGTAACTCGCCTTGATCGTTGGG |
| | AACCGGAGCTGAATGAAGCCATACCAAACGACGAGCGTGACACCACGATGCCTGTAGCAATGGCAACAACGTTGCGCAAACTATTAACTGGCGAACTA |
| | CTTACTCTAGCTTCCCGGCAACAATTAATAGACTGGATGGAGGCGGATAAAGTTGCAGGACCACTTCTGCGCTCGGCCCTTCCGGCTGGCTGGTTTAT |
| | TGCTGATAAATCTGGAGCCGGTGAGCGTGGGTCTCGCGGTATCATTGCAGCACTGGGGCCAGATGGTAAGCCCTCCCGTATCGTAGTTATCTACACGA |
| | CGGGGAGTCAGGCAACTATGGATGAACGAAATAGACAGATCGCTGAGATAGGTGCCTCACTGATTAAGCATTGGTAACTGTCAGACCAAGTTTACTCA |
| | TATATACTTTAGATTGATTTAAAACTTCATTTTTAATTTAAAAGGATCTAGGTGAAGATCCTTTTTGATAATCTCATGACCAAAATCCCTTAACGTGA |
| | GTTTTCGTTCCACTGAGCGTCAGACCCCGTAGAAAAGATCAAAGGATCTTCTTGAGATCCTTTTTTTCTGCGCGTAATCTGCTGCTTGCAAACAAAAA |
| | AACCACCGCTACCAGCGGTGGTTTGTTTGCCGGATCAAGAGCTACCAACTCTTTTTCCGAAGGTAACTGGCTTCAGCAGAGCGCAGATACCAAATACT |
| | GTCCTTCTAGTGTAGCCGTAGTTAGGCCACCACTTCAAGAACTCTGTAGCACCGCCTACATACCTCGCTCTGCTAATCCTGTTACCAGTGGCTGCTGC |
| | CAGTGGCGATAAGTCGTGTCTTACCGGGTTGGACTCAAGACGATAGTTACCGGATAAGGCGCAGCGGTCGGGCTGAACGGGGGGTTCGTGCACACAGC |
| | CCAGCTTGGAGCGAACGACCTACACCGAACTGAGATACCTACAGCGTGAGCATTGAGAAAGCGCCACGCTTCCCGAAGGGAGAAAGGCGGACAGGTAT |
| | CCGGTAAGCGGCAGGGTCGGAACAGGAGAGCGCACGAGGGAGCTTCCAGGGGGAAACGCCTGGTATCTTTATAGTCCTGTCGGGTTTCGCCACCTCTG |
| | ACTTGAGCGTCGATTTTTGTGATGCTCGTCAGGGGGGCGGAGCCTATGGAAAAACGCCAGCAACGCGGCCTTTTTACGGTTCCTGGCCTTTTGCTGGC |
| | CTTTTGCTCACATGTTCTTTCCTGCGTTATCCCCTGATTCTGTGGATAACCGTATTACCGCCTTTGAGTGAGCTGATACCGCTCGCCGCAGCCGAACG |
| | ACCGAGCGCAGCGAGTCAGTGAGCGAGGAAGCGGAAGAGCGCCTGATGCGGTATTTTCTCCTTACGCATCTGTGCGGTATTTCACACCGCAGACCAGC |
| | CGCGTAACCTGGCAAAATCGGTTACGGTTGAGTAATAAATGGATGCCCTGCGTAAGCGGGTGTGGGCGGACAATAAAGTCTTAAACTGAACAAAATAG |
| | ATCTAAACTATGACAATAAAGTCTTAAACTAGACAGAATAGTTGTAAACTGAAATCAGTCCAGTTATGCTGTGAAAAAGCATACTGGACTTTTGTTAT |
| | GGCTAAAGCAAACTCTTCATTTTCTGAAGTGCAAATTGCCCGTCGTATTAAAGAGGGGCGTGGCCAAGGGCATGGTAAAGACTATATTCGCGGCGTTG |
| | TGACAATTTACCGAACAACTCCGCGGCCGGGAAGCCGATCTCGGCTTGAACGAATTGTTAGGTGGCGGTACTTGGGTCGATATCAAAGTGCATCACTT |
| | CTTCCCGTATGCCCAACTTTGTATAGAGAGCCACTGCGGGATCGTCACCGTAATCTGCTTGCACGTAGATCACATAAGCACCAAGCGCGTTGGCCTCA |
| | TGCTTGAGGAGATTGATGAGCGCGGTGGCAATGCCCTGCCTCCGGTGCTCGCCGGAGACTGCGAGATCATAGATATAGATCTCACTACGCGGCTGCTC |
| | AAACCTGGGCAGAACGTAAGCCGCGAGAGCGCCAACAACCGCTTCTTGGTCGAAGGCAGCAAGCGCGATGAATGTCTTACTACGGAGCAAGTTCCCGA |
| | GGTAATCGGAGTCCGGCTGATGTTGGGAGTAGGTGGCTACGTCTCCGAACTCACGACCGAAAAGATCAAGAGCAGCCCGCATGGATTTGACTTGGTCA |
| | GGGCCGAGCCTACATGTGCGAATGATGCCCATACTTGAGCCACCTAACTTTGTTTTAGGGCGACTGCCCTGCTGCGTAACATCGTTGCTGCTGCGTAA |
| | CATCGTTGCTGCTCCATAACATCAAACATCGACCCACGGCGTAACGCGCTTGCTGCTTGGATGCCCGAGGCATAGACTGTACAAAAAAACAGTCATAA |
| | CAAGCCATGAAAACCGCCACTGCGCCGTTACCACCGCTGCGTTCGGTCAAGGTTCTGGACCAGTTGCGTGAGCGCATACGCTACTTGCATTACAGTTT |
| | ACGAACCGAACAGGCTTATGTCAACTGGGTTCGTGCCTTCATCCGTTTCCACGGTGTGCGTCACCCGGCAACCTTGGGCAGCAGCGAAGTCGAGGCAT |
| | TTCTGTCCTGGCTGGCGAACGAGCGCAAGGTTTCGGTCTCCACGCATCGTCAGGCATTGGCGGCCTTGCTGTTCTTCTACGGCAAGGTGCTGTGCACG |
| | GATCTGCCCTGGCTTCAGGAGATCGGAAGACCTCGGCCGTCGCGGCGCTTGCCGGTGGTGCTGACCCCGGATGAAGTGGTTCGCATCCTCGGTTTTCT |
| | GGAAGGCGAGCATCGTTTGTTCGCCCAGGACTCTAGCTATAGTTCTAGTGGTTGGCTACGTATACTCCGGAATATTAATAGATCATGGAGATAATTAA |
| | AATGATAACCATCTCGCAAATAAATAAGTATTTTACTGTTTTCGTAACAGTTTTGTAATAAAAAAACCTATAAATATTCCGGATTATTCATACCGTCC |
| | CACCATCGGGCGCGGATCTCGGTCCGAAACCATGTCGTACTACCATCACCATCACCATCACGATTACGATATCCCAACGACCGAAAACCTGTATTTTC |
| | AGGGCGCCATGGGATCCGGCCGGCCCCTGCAGGCAGCTGCGCGCTCGCTCGCTCACTGAGGCCGCCCGGGCAAAGCCCGGGCGTCGGGCGACCTTTGG |
| | TCGCCCGGCCTCAGTGAGCGAGCGAGCGCGCAGAGAGGGAGTGGCCAACTCCATCACTAGGGGTTCCTTGTAGTTAATGATTAACCCGCCATGCTACT |
| | TATCTACGTAGCCATGCTCTAGAGCGGCCGCAGGCTCAGAGGCACACAGGAGTTTCTGGGCTCACCCTGCCCCCTTCCAACCCCTCAGTTCCCATCCT |
| | CCAGCAGCTGTTTGTGTGCTGCCTCTGAAGTCCACACTGAACAAACTTCAGCCTACTCATGTCCCTAAAATGGGCAAACATTGCAAGCAGCAAACAGC |
| | AAACACACAGCCCTCCCTGCCTGCTGACCTTGGAGCTGGGGCAGAGGTCAGAGACCTCTCTGGGCCCATGCCACCTCCAACATCCACTCGACCCCTTG |
| | GAATTTCGGTGGAGAGGAGCAGAGGTTGTCCTGGCGTGGTTTAGGTAGTGTGAGAGGGTCCGGGTTCAAAACCACTTGCTGGGTGGGGAGTCGTCAGT |
| | AAGTGGCTATGCCCCGACCCCGAAGCCTGTTTCCCCATCTGTACAATGGAAATGATAAAGACGCCCATCTGATAGGGTTTTTGTGGCAAATAAACATT |
| | TGGTTTTTTTGTTTTGTTTTGTTTTGTTTTTTGAGATGGAGGTTTGCTCTGTCGCCCAGGCTGGAGTGCAGTGACACAATCTCATCTCACCACAACCT |
| | TCCCCTGCCTCAGCCTCCCAAGTAGCTGGGATTACAAGCATGTGCCACCACACCTGGCTAATTTTCTATTTTTAGTAGAGACGGGTTTCTCCATGTTG |
| | GTCAGCCTCAGCCTCCCAAGTAACTGGGATTACAGGCCTGTGCCACCACACCCGGCTAATTTTTTCTATTTTTGACAGGGACGGGGTTTCACCATGTT |
| | GGTCAGGCTGGTCTAGAGGTACCGGATCTTGCTACCAGTGGAACAGCCACTAAGGATTCTGCAGTGAGAGCAGAGGGCCAGCTAAGTGGTACTCTCCC |
| | AGAGACTGTCTGACTCACGCCACCCCCTCCACCTTGGACACAGGACGCTGTGGTTTCTGAGCCAGGTACAATGACTCCTTTCGGTAAGTGCAGTGGAA |
| | GCTGTACACTGCCCAGGCAAAGCGTCCGGGCAGCGTAGGCGGGCGACTCAGATCCCAGCCAGTGGACTTAGCCCCTGTTTGCTCCTCCGATAACTGGG |
| | GTGACCTTGGTTAATATTCACCAGCAGCCTCCCCCGTTGCCCCTCTGGATCCACTGCTTAAATACGGACGAGGACAGGGCCCTGTCTCCTCAGCTTCA |
| | GGCACCACCACTGACCTGGGACAGTGAATCCGGACTCTAAGGTAAATATAAAATTTTTAAGTGTATAATGTGTTAAACTACTGATTCTAATTGTTTCT |
| | CTCTTTTAGATTCCAACCTTTGGAACTGAGTTTAAACCGCAGCCACCATGCAGATCGAGCTGTCTACCTGCTTCTTCCTGTGCCTGCTGCGGTTCTGC |
| | TTCAGCGCCACCAGAAGATATTACCTGGGCGCCGTGGAACTGAGCTGGGACTACATGCAGTCTGACCTGGGAGAGCTGCCCGTGGACGCTAGATTTCC |
| | TCCAAGAGTGCCCAAGAGCTTCCCCTTCAACACCTCCGTGGTGTACAAGAAAACCCTGTTCGTGGAATTCACCGACCACCTGTTCAATATCGCCAAGC |
| | CTCGGCCTCCTTGGATGGGACTGCTGGGACCTACAATTCAGGCCGAGGTGTACGACACCGTGGTCATCACCCTGAAGAACATGGCCAGCCATCCTGTG |
| | TCTCTGCACGCCGTGGGAGTGTCTTATTGGAAGGCTTCTGAGGGCGCCGAGTACGACGATCAGACAAGCCAGAGAGAGAAAGAGGACGACAAGGTTTT |
| | CCCTGGCGGCAGCCACACCTATGTCTGGCAGGTCCTGAAAGAAAACGGCCCTATGGCCTCCGATCCTCTGTGCCTGACATACAGCTACCTGAGCCACG |
| | TGGACCTGGTCAAGGACCTGAATTCTGGCCTGATCGGAGCCCTGCTCGTGTGTAGAGAAGGCAGCCTGGCCAAAGAGAAAACCCAGACACTGCACAAG |
| | TTCATCCTGCTGTTCGCCGTGTTCGACGAGGGCAAGAGCTGGCACAGCGAGACAAAGAACAGCCTGATGCAGGACAGGGATGCCGCCTCTGCTAGAGC |
| | TTGGCCTAAGATGCACACCGTGAACGGCTACGTGAACAGAAGCCTGCCTGGACTGATCGGCTGCCACAGAAAGTCCGTGTACTGGCACGTGATCGGCA |
| | TGGGCACAACACCTGAGGTGCACAGCATCTTTCTGGAAGGCCACACCTTCCTCGTGCGGAACCACAGACAGGCCAGCCTGGAAATCAGCCCTATCACC |
| | TTCCTGACCGCTCAGACCCTGCTGATGGATCTGGGCCAGTTTCTGCTGTTCTGCCACATCAGCTCCCACCAGCACGATGGCATGGAAGCCTACGTGAA |
| | GGTGGACAGCTGCCCCGAAGAACCCCAGCTGCGGATGAAGAACAACGAGGAAGCCGAGGACTACGACGACGACCTGACCGACTCTGAGATGGACGTCG |
| | TCAGATTCGACGACGATAACAGCCCCAGCTTCATCCAGATCAGAAGCGTGGCCAAGAAGCACCCCAAGACCTGGGTGCACTATATCGCCGCCGAGGAA |
| | GAGGACTGGGATTACGCTCCTCTGGTGCTGGCCCCTGACGACAGAAGCTACAAGAGCCAGTACCTGAACAACGGCCCTCAGCGGATCGGCCGGAAGTA |
| | TAAGAAAGTGCGGTTCATGGCCTACACCGACGAGACATTCAAGACCAGAGAGGCCATCCAGCACGAGAGCGGAATTCTGGGCCCTCTGCTGTATGGCG |
| | AAGTGGGCGATACACTGCTGATCATCTTCAAGAACCAGGCCAGCAGACCCTACAACATCTACCCTCACGGCATCACCGATGTGCGGCCCCTGTATTCT |
| | AGAAGGCTGCCCAAGGGCGTGAAGCACCTGAAGGACTTCCCTATCCTGCCTGGCGAGATTTTCAAGTACAAGTGGACCGTGACCGTGGAAGATGGCCC |
| | CACCAAGAGCGACCCTAGATGTCTGACACGGTACTACAGCAGCTTCGTGAACATGGAACGCGACCTGGCCAGCGGCCTGATTGGACCTCTGCTGATCT |
| | GCTACAAAGAAAGCGTGGACCAGCGGGGCAACCAGATCATGAGCGACAAGCGGAACGTGATCCTGTTTAGCGTGTTCGATGAGAACCGGTCCTGGTAT |
| | CTGACCGAGAACATCCAGCGGTTTCTGCCCAATCCTGCCGGGGTGCAACTGGAAGATCCTGAGTTCCAGGCAAGCAACATCATGCACTCCATCAATGG |
| | CTATGTGTTCGACAGCCTGCAGCTGAGCGTGTGCCTGCACGAAGTGGCCTACTGGTACATCCTGAGCATTGGCGCCCAGACCGACTTCCTGTCCGTGT |
| | TCTTTAGCGGCTACACCTTCAAGCACAAGATGGTGTACGAGGATACCCTGACACTGTTCCCATTCAGCGGCGAGACAGTGTTCATGAGCATGGAAAAC |
| | CCCGGCCTGTGGATTCTGGGCTGTCACAACAGCGACTTCCGGAACAGAGGCATGACAGCCCTGCTGAAGGTGTCCAGCTGCGACAAGAACACCGGCGA |
| | CTACTACGAGGACAGCTATGAGGACATCAGCGCCTACCTGCTGAGCAAGAACAATGCCATCGAGCCTCGGAGCTTCAGCCAGAATCCTCCTGTGCTGA |
| | AGCGGCACCAGCGCGAGATCACCAGAACAACCCTGCAGAGCGACCAAGAGGAAATCGATTACGACGACACCATCAGCGTCGAGATGAAGAAAGAAGAT |
| | TTCGACATCTACGACGAGGACGAGAATCAGAGCCCCAGAAGCTTTCAGAAAAAGACCCGGCACTACTTCATTGCCGCCGTCGAGAGACTGTGGGACTA |
| | CGGCATGTCTAGCAGCCCTCACGTGCTGAGAAATAGAGCCCAGAGCGGCAGCGTGCCCCAGTTCAAGAAAGTGGTGTTCCAAGAGTTCACCGACGGCA |
| | GCTTCACCCAGCCACTGTATAGAGGCGAGCTGAACGAGCATCTGGGCCTGCTGGGCCCTTATATCAGAGCCGAAGTGGAAGATAACATCATGGTCACC |
| | TTCCGGAATCAGGCTAGCCGGCCTTACAGCTTCTACAGCTCCCTGATCAGCTACGAAGAGGACCAGAGACAGGGCGCTGAGCCCAGAAAGAACTTCGT |
| | GAAGCCCAACGAGACTAAGACCTACTTTTGGAAGGTGCAGCACCACATGGCCCCTACAAAGGACGAGTTCGACTGCAAAGCCTGGGCCTACTTCTCCG |
| | ATGTGGATCTGGAAAAGGACGTGCACAGCGGGCTCATCGGACCACTGCTTGTGTGCCACACCAACACACTGAACCCCGCTCACGGCAGACAAGTGACA |
| | GTGCAAGAGTTCGCCCTGTTCTTCACCATCTTCGACGAAACAAAGAGCTGGTACTTCACCGAGAATATGGAACGGAACTGCAGAGCCCCTTGCAACAT |
| | CCAGATGGAAGATCCCACCTTCAAAGAGAACTACCGGTTCCACGCCATCAACGGCTACATCATGGACACACTGCCCGGCCTGGTTATGGCCCAGGATC |
| | AGAGAATCCGGTGGTATCTGCTGTCCATGGGCTCCAACGAGAATATCCACAGCATCCACTTCAGCGGCCACGTGTTCACCGTGCGGAAAAAAGAAGAG |
| | TACAAAATGGCCCTGTACAATCTGTACCCTGGGGTGTTCGAAACCGTGGAAATGCTGCCTTCCAAGGCCGGCATTTGGAGAGTGGAATGTCTGATTGG |
| | AGAGCACCTCCACGCCGGAATGAGCACCCTGTTTCTGGTGTACAGCAACAAGTGTCAGACCCCTCTCGGCATGGCCTCTGGACACATCAGAGACTTCC |
| | AGATCACCGCCTCTGGCCAGTACGGACAGTGGGCTCCTAAACTGGCTCGGCTGCACTACAGCGGCAGCATCAATGCCTGGTCCACCAAAGAGCCCTTC |
| | AGCTGGATCAAGGTGGACCTGCTGGCTCCCATGATCATCCACGGAATCAAGACCCAGGGCGCCAGACAGAAGTTCAGCAGCCTGTACATCAGCCAGTT |
| | CATCATCATGTACAGCCTGGACGGCAAGAAGTGGCAGACCTACAGAGGCAACAGCACCGGCACACTCATGGTGTTCTTCGGCAACGTGGACTCCAGCG |
| | GCATTAAGCACAACATCTTCAACCCTCCAATCATTGCCCGGTACATCCGGCTGCACCCCACACACTACAGCATCCGGTCTACCCTGAGAATGGAACTG |
| | ATGGGCTGCGACCTGAACAGCTGCTCTATGCCCCTCGGAATGGAAAGCAAGGCCATCAGCGACGCCCAGATCACAGCCAGCAGCTACTTCACCAACAT |
| | GTTCGCCACTTGGAGCCCCTCCAAGGCTAGACTGCATCTGCAGGGCAGAAGCAACGCTTGGAGGCCCCAAGTGAACAACCCCAAAGAGTGGCTGCAGG |
| | TTGACTTTCAAAAGACCATGAAAGTGACCGGCGTGACCACACAGGGCGTCAAGTCTCTGCTGACCTCTATGTACGTGAAAGAGTTCCTGATCTCCAGC |
| | AGCCAGGACGGCCATCAGTGGACCCTGTTTTTCCAGAACGGCAAAGTGAAAGTGTTCCAGGGCAATCAGGACAGCTTCACACCCGTGGTCAATTCTCT |
| | GGACCCTCCACTGCTGACCAGATACCTGCGGATTCACCCTCAGTCTTGGGTGCACCAGATCGCTCTGCGGATGGAAGTGCTGGGCTGTGAAGCTCAGG |
| | ACCTCTACTAGTTAATTAAGAGCATCTTACCGCCATTTATTCCCATATTTGTTCTGTTTTTCTTGATTTGGGTATACATTTAAATGTTAATAAAACAA |
| | AATGGTGGGGCAATCATTTACATTTTTAGGGATATGTAATTACTAGTTCAGGTGTATTGCCACAAGACAAACATGTTAAGAAACTTTCCCGTTATTTA |
| | CGCTCTGTTCCTGTTAATCAACCTCTGGATTACAAAATTTGTGAAAGATTGACTGATATTCTTAACTATGTTGCTCCTTTTACGCTGTGTGGATATGC |
| | TGCTTTATAGCCTCTGTATCTAGCTATTGCTTCCCGTACGGCTTTCGTTTTCTCCTCCTTGTATAAATCCTGGTTGCTGTCTCTTTTAGAGGAGTTGT |
| | GGCCCGTTGTCCGTCAACGTGGCGTGGTGTGCTCTGTGTTTGCTGACGCAACCCCCACTGGCTGGGGCATTGCCACCACCTGTCAACTCCTTTCTGGG |
| | ACTTTCGCTTTCCCCCTCCCGATCGCCACGGCAGAACTCATCGCCGCCTGCCTTGCCCGCTGCTGGACAGGGGCTAGGTTGCTGGGCACTGATAATTC |
| | CGTGGTGTTGTCTGTGCCTTCTAGTTGCCAGCCATCTGTTGTTTGCCCCTCCCCCGTGCCTTCCTTGACCCTGGAAGGTGCCACTCCCACTGTCCTTT |
| | CCTAATAAAATGAGGAAATTGCATCGCATTGTCTGAGTAGGTGTCATTCTATTCTGGGGGGTGGGGTGGGGCAGGACAGCAAGGGGGAGGATTGGGAA |
| | GACAATAGCAGGCATGCTGGGGATGCGGTGGGCTCTATGGCTCTAGAGCATGGCTACGTAGATAAGTAGCATGGCGGGTTAATCATTAACTACACCTG |
| | CAGGAGGAACCCCTAGTGATGGAGTTGGCCACTCCCTCTCTGCGCGCTCGCTCGCTCACTGAGGCCGGGCGACCAAAGGTCGCCCGACGCCCGGGCGG |
| | CCTCAGTGAGCGAGCGAGCGCGCAGCTGCCTGCAGGGGCGCGCCTCGAGGCATGCGGTACCAAGCTTGTCGAGAAGTACTAGAGGATCATAATCAGCC |
| | ATACCACATTTGTAGAGGTTTTACTTGCTTTAAAAAACCTCCCACACCTCCCCCTGAACCTGAAACATAAAATGAATGCAATTGTTGTTGTTAACTTG |
| | TTTATTGCAGCTTATAATGGTTACAAATAAAGCAATAGCATCACAAATTTCACAAATAAAGCATTTTTTTCACTGCATTCTAGTTGTGGTTTGTCCAA |
| | ACTCATCAATGTATCTTATCATGTCTGGATCTGATCACTGATATCGCCTAGGAGATCCGAACCAGATAAGTGAAATCTAGTTCCAAACTATTTTGTCA |
| | TTTTTAATTTTCGTATTAGCTTACGACGCTACACCCAGTTCCCATCTATTTTGTCACTCTTCCCTAAATAATCCTTAAAAACTCCATTTCCACCCCTC |
| | CCAGTTCCCAACTATTTTGTCCGCCCACAGCGGGGCATTTTTCTTCCTGTTATGTTTTTAATCAAACATCCTGCCAACTCCATGTGACAAACCGTCAT |
| | CTTCGGCTACTTTTTCTCTGTCACAGAATGAAAATTTTTCTGTCATCTCTTCGTTATTAATGTTTGTAATTGACTGAATATCAACGCTTATTTGCAGC |
| | CTGAATGGCGAATGG |
| ceDNAFVIII- | GACGCGCCCTGTAGCGGCGCATTAAGCGCGGCGGGTGTGGTGGTTACGCGCAGCGTGACCGCTACACTTGCCAGCGCCCTAGCGCCCGCTCCTTTCGC |
| vector 3 | TTTCTTCCCTTCCTTTCTCGCCACGTTCGCCGGCTTTCCCCGTCAAGCTCTAAATCGGGGGCTCCCTTTAGGGTTCCGATTTAGTGCTTTACGGCACC |
| (SEQ ID NO: | TCGACCCCAAAAAACTTGATTAGGGTGATGGTTCACGTAGTGGGCCATCGCCCTGATAGACGGTTTTTCGCCCTTTGACGTTGGAGTCCACGTTCTTT |
| 194) | AATAGTGGACTCTTGTTCCAAACTGGAACAACACTCAACCCTATCTCGGTCTATTCTTTTGATTTATAAGGGATTTTGCCGATTTCGGCCTATTGGTT |
| | AAAAAATGAGCTGATTTAACAAAAATTTAACGCGAATTTTAACAAAATATTAACGTTTACAATTTCAGGTGGCACTTTTCGGGGAAATGTGCGCGGAA |
| | CCCCTATTTGTTTATTTTTCTAAATACATTCAAATATGTATCCGCTCATGAGACAATAACCCTGATAAATGCTTCAATAATATTGAAAAAGGAAGAGT |
| | ATGAGTATTCAACATTTCCGTGTCGCCCTTATTCCCTTTTTTGCGGCATTTTGCCTTCCTGTTTTTGCTCACCCAGAAACGCTGGTGAAAGTAAAAGA |
| | TGCTGAAGATCAGTTGGGTGCACGAGTGGGTTACATCGAACTGGATCTCAACAGCGGTAAGATCCTTGAGAGTTTTCGCCCCGAAGAACGTTTTCCAA |
| | TGATGAGCACTTTTAAAGTTCTGCTATGTGGCGCGGTATTATCCCGTATTGACGCCGGGCAAGAGCAACTCGGTCGCCGCATACACTATTCTCAGAAT |
| | GACTTGGTTGAGTACTCACCAGTCACAGAAAAGCATCTTACGGATGGCATGACAGTAAGAGAATTATGCAGTGCTGCCATAACCATGAGTGATAACAC |
| | TGCGGCCAACTTACTTCTGACAACGATCGGAGGACCGAAGGAGCTAACCGCTTTTTTGCACAACATGGGGGATCATGTAACTCGCCTTGATCGTTGGG |
| | AACCGGAGCTGAATGAAGCCATACCAAACGACGAGCGTGACACCACGATGCCTGTAGCAATGGCAACAACGTTGCGCAAACTATTAACTGGCGAACTA |
| | CTTACTCTAGCTTCCCGGCAACAATTAATAGACTGGATGGAGGCGGATAAAGTTGCAGGACCACTTCTGCGCTCGGCCCTTCCGGCTGGCTGGTTTAT |
| | TGCTGATAAATCTGGAGCCGGTGAGCGTGGGTCTCGCGGTATCATTGCAGCACTGGGGCCAGATGGTAAGCCCTCCCGTATCGTAGTTATCTACACGA |
| | CGGGGAGTCAGGCAACTATGGATGAACGAAATAGACAGATCGCTGAGATAGGTGCCTCACTGATTAAGCATTGGTAACTGTCAGACCAAGTTTACTCA |
| | TATATACTTTAGATTGATTTAAAACTTCATTTTTAATTTAAAAGGATCTAGGTGAAGATCCTTTTTGATAATCTCATGACCAAAATCCCTTAACGTGA |
| | GTTTTCGTTCCACTGAGCGTCAGACCCCGTAGAAAAGATCAAAGGATCTTCTTGAGATCCTTTTTTTCTGCGCGTAATCTGCTGCTTGCAAACAAAAA |
| | AACCACCGCTACCAGCGGTGGTTTGTTTGCCGGATCAAGAGCTACCAACTCTTTTTCCGAAGGTAACTGGCTTCAGCAGAGCGCAGATACCAAATACT |
| | GTCCTTCTAGTGTAGCCGTAGTTAGGCCACCACTTCAAGAACTCTGTAGCACCGCCTACATACCTCGCTCTGCTAATCCTGTTACCAGTGGCTGCTGC |
| | CAGTGGCGATAAGTCGTGTCTTACCGGGTTGGACTCAAGACGATAGTTACCGGATAAGGCGCAGCGGTCGGGCTGAACGGGGGGTTCGTGCACACAGC |
| | CCAGCTTGGAGCGAACGACCTACACCGAACTGAGATACCTACAGCGTGAGCATTGAGAAAGCGCCACGCTTCCCGAAGGGAGAAAGGCGGACAGGTAT |
| | CCGGTAAGCGGCAGGGTCGGAACAGGAGAGCGCACGAGGGAGCTTCCAGGGGGAAACGCCTGGTATCTTTATAGTCCTGTCGGGTTTCGCCACCTCTG |
| | ACTTGAGCGTCGATTTTTGTGATGCTCGTCAGGGGGGCGGAGCCTATGGAAAAACGCCAGCAACGCGGCCTTTTTACGGTTCCTGGCCTTTTGCTGGC |
| | CTTTTGCTCACATGTTCTTTCCTGCGTTATCCCCTGATTCTGTGGATAACCGTATTACCGCCTTTGAGTGAGCTGATACCGCTCGCCGCAGCCGAACG |
| | ACCGAGCGCAGCGAGTCAGTGAGCGAGGAAGCGGAAGAGCGCCTGATGCGGTATTTTCTCCTTACGCATCTGTGCGGTATTTCACACCGCAGACCAGC |
| | CGCGTAACCTGGCAAAATCGGTTACGGTTGAGTAATAAATGGATGCCCTGCGTAAGCGGGTGTGGGCGGACAATAAAGTCTTAAACTGAACAAAATAG |
| | ATCTAAACTATGACAATAAAGTCTTAAACTAGACAGAATAGTTGTAAACTGAAATCAGTCCAGTTATGCTGTGAAAAAGCATACTGGACTTTTGTTAT |
| | GGCTAAAGCAAACTCTTCATTTTCTGAAGTGCAAATTGCCCGTCGTATTAAAGAGGGGCGTGGCCAAGGGCATGGTAAAGACTATATTCGCGGCGTTG |
| | TGACAATTTACCGAACAACTCCGCGGCCGGGAAGCCGATCTCGGCTTGAACGAATTGTTAGGTGGCGGTACTTGGGTCGATATCAAAGTGCATCACTT |
| | CTTCCCGTATGCCCAACTTTGTATAGAGAGCCACTGCGGGATCGTCACCGTAATCTGCTTGCACGTAGATCACATAAGCACCAAGCGCGTTGGCCTCA |
| | TGCTTGAGGAGATTGATGAGCGCGGTGGCAATGCCCTGCCTCCGGTGCTCGCCGGAGACTGCGAGATCATAGATATAGATCTCACTACGCGGCTGCTC |
| | AAACCTGGGCAGAACGTAAGCCGCGAGAGCGCCAACAACCGCTTCTTGGTCGAAGGCAGCAAGCGCGATGAATGTCTTACTACGGAGCAAGTTCCCGA |
| | GGTAATCGGAGTCCGGCTGATGTTGGGAGTAGGTGGCTACGTCTCCGAACTCACGACCGAAAAGATCAAGAGCAGCCCGCATGGATTTGACTTGGTCA |
| | GGGCCGAGCCTACATGTGCGAATGATGCCCATACTTGAGCCACCTAACTTTGTTTTAGGGCGACTGCCCTGCTGCGTAACATCGTTGCTGCTGCGTAA |
| | CATCGTTGCTGCTCCATAACATCAAACATCGACCCACGGCGTAACGCGCTTGCTGCTTGGATGCCCGAGGCATAGACTGTACAAAAAAACAGTCATAA |
| | CAAGCCATGAAAACCGCCACTGCGCCGTTACCACCGCTGCGTTCGGTCAAGGTTCTGGACCAGTTGCGTGAGCGCATACGCTACTTGCATTACAGTTT |
| | ACGAACCGAACAGGCTTATGTCAACTGGGTTCGTGCCTTCATCCGTTTCCACGGTGTGCGTCACCCGGCAACCTTGGGCAGCAGCGAAGTCGAGGCAT |
| | TTCTGTCCTGGCTGGCGAACGAGCGCAAGGTTTCGGTCTCCACGCATCGTCAGGCATTGGCGGCCTTGCTGTTCTTCTACGGCAAGGTGCTGTGCACG |
| | GATCTGCCCTGGCTTCAGGAGATCGGAAGACCTCGGCCGTCGCGGCGCTTGCCGGTGGTGCTGACCCCGGATGAAGTGGTTCGCATCCTCGGTTTTCT |
| | GGAAGGCGAGCATCGTTTGTTCGCCCAGGACTCTAGCTATAGTTCTAGTGGTTGGCTACGTATACTCCGGAATATTAATAGATCATGGAGATAATTAA |
| | AATGATAACCATCTCGCAAATAAATAAGTATTTTACTGTTTTCGTAACAGTTTTGTAATAAAAAAACCTATAAATATTCCGGATTATTCATACCGTCC |
| | CACCATCGGGCGCGGATCTCGGTCCGAAACCATGTCGTACTACCATCACCATCACCATCACGATTACGATATCCCAACGACCGAAAACCTGTATTTTC |
| | AGGGCGCCATGGGATCCGGCCGGCCCCTGCAGGCAGCTGCGCGCTCGCTCGCTCACTGAGGCCGCCCGGGCAAAGCCCGGGCGTCGGGCGACCTTTGG |
| | TCGCCCGGCCTCAGTGAGCGAGCGAGCGCGCAGAGAGGGAGTGGCCAACTCCATCACTAGGGGTTCCTTGTAGTTAATGATTAACCCGCCATGCTACT |
| | TATCTACGTAGCCATGCTCTAGAGCGGCCGCCCCTAAAATGGGCAAACATTGCAAGCAGCAAACAGCAAACACACAGCCCTCCCTGCCTGCTGACCTT |
| | GGAGCTGGGGCAGAGGTCAGAGACCTCTCTGGGCCCATGCCACCTCCAACATCCACTCGACCCCTTGGAATTTTTCGGTGGAGAGGAGCAGAGGTTGT |
| | CCTGGCGTGGTTTAGGTAGTGTGAGAGGGGAATGACTCCTTTCGGTAAGTGCAGTGGAAGCTGTACACTGCCCAGGCAAAGCGTCCGGGCAGCGTAGG |
| | CGGGCGACTCAGATCCCAGCCAGTGGACTTAGCCCCTGTTTGCTCCTCCGATAACTGGGGTGACCTTGGTTAATATTCACCAGCAGCCTCCCCCGTTG |
| | CCCCTCTGGATCCACTGCTTAAATACGGACGAGGACAGGGCCCTGTCTCCTCAGCTTCAGGCACCACCACTGACCTGGGACAGTGAATCCGGACTCTA |
| | AGGTAAATATAAAATTTTTAAGTGTATAATGTGTTAAACTACTGATTCTAATTGTTTCTCTCTTTTAGATTCCAACCTTTGGAACTGAGTTTAAACCG |
| | CAGCCACCATGCAGATCGAGCTGTCTACCTGCTTCTTCCTGTGCCTGCTGCGGTTCTGCTTCAGCGCCACCAGAAGATATTACCTGGGCGCCGTGGAA |
| | CTGAGCTGGGACTACATGCAGTCTGACCTGGGAGAGCTGCCCGTGGACGCTAGATTTCCTCCAAGAGTGCCCAAGAGCTTCCCCTTCAACACCTCCGT |
| | GGTGTACAAGAAAACCCTGTTCGTGGAATTCACCGACCACCTGTTCAATATCGCCAAGCCTCGGCCTCCTTGGATGGGACTGCTGGGACCTACAATTC |
| | AGGCCGAGGTGTACGACACCGTGGTCATCACCCTGAAGAACATGGCCAGCCATCCTGTGTCTCTGCACGCCGTGGGAGTGTCTTATTGGAAGGCTTCT |
| | GAGGGCGCCGAGTACGACGATCAGACAAGCCAGAGAGAGAAAGAGGACGACAAGGTTTTCCCTGGCGGCAGCCACACCTATGTCTGGCAGGTCCTGAA |
| | AGAAAACGGCCCTATGGCCTCCGATCCTCTGTGCCTGACATACAGCTACCTGAGCCACGTGGACCTGGTCAAGGACCTGAATTCTGGCCTGATCGGAG |
| | CCCTGCTCGTGTGTAGAGAAGGCAGCCTGGCCAAAGAGAAAACCCAGACACTGCACAAGTTCATCCTGCTGTTCGCCGTGTTCGACGAGGGCAAGAGC |
| | TGGCACAGCGAGACAAAGAACAGCCTGATGCAGGACAGGGATGCCGCCTCTGCTAGAGCTTGGCCTAAGATGCACACCGTGAACGGCTACGTGAACAG |
| | AAGCCTGCCTGGACTGATCGGCTGCCACAGAAAGTCCGTGTACTGGCACGTGATCGGCATGGGCACAACACCTGAGGTGCACAGCATCTTTCTGGAAG |
| | GCCACACCTTCCTCGTGCGGAACCACAGACAGGCCAGCCTGGAAATCAGCCCTATCACCTTCCTGACCGCTCAGACCCTGCTGATGGATCTGGGCCAG |
| | TTTCTGCTGTTCTGCCACATCAGCTCCCACCAGCACGATGGCATGGAAGCCTACGTGAAGGTGGACAGCTGCCCCGAAGAACCCCAGCTGCGGATGAA |
| | GAACAACGAGGAAGCCGAGGACTACGACGACGACCTGACCGACTCTGAGATGGACGTCGTCAGATTCGACGACGATAACAGCCCCAGCTTCATCCAGA |
| | TCAGAAGCGTGGCCAAGAAGCACCCCAAGACCTGGGTGCACTATATCGCCGCCGAGGAAGAGGACTGGGATTACGCTCCTCTGGTGCTGGCCCCTGAC |
| | GACAGAAGCTACAAGAGCCAGTACCTGAACAACGGCCCTCAGCGGATCGGCCGGAAGTATAAGAAAGTGCGGTTCATGGCCTACACCGACGAGACATT |
| | CAAGACCAGAGAGGCCATCCAGCACGAGAGCGGAATTCTGGGCCCTCTGCTGTATGGCGAAGTGGGCGATACACTGCTGATCATCTTCAAGAACCAGG |
| | CCAGCAGACCCTACAACATCTACCCTCACGGCATCACCGATGTGCGGCCCCTGTATTCTAGAAGGCTGCCCAAGGGCGTGAAGCACCTGAAGGACTTC |
| | CCTATCCTGCCTGGCGAGATTTTCAAGTACAAGTGGACCGTGACCGTGGAAGATGGCCCCACCAAGAGCGACCCTAGATGTCTGACACGGTACTACAG |
| | CAGCTTCGTGAACATGGAACGCGACCTGGCCAGCGGCCTGATTGGACCTCTGCTGATCTGCTACAAAGAAAGCGTGGACCAGCGGGGCAACCAGATCA |
| | TGAGCGACAAGCGGAACGTGATCCTGTTTAGCGTGTTCGATGAGAACCGGTCCTGGTATCTGACCGAGAACATCCAGCGGTTTCTGCCCAATCCTGCC |
| | GGGGTGCAACTGGAAGATCCTGAGTTCCAGGCAAGCAACATCATGCACTCCATCAATGGCTATGTGTTCGACAGCCTGCAGCTGAGCGTGTGCCTGCA |
| | CGAAGTGGCCTACTGGTACATCCTGAGCATTGGCGCCCAGACCGACTTCCTGTCCGTGTTCTTTAGCGGCTACACCTTCAAGCACAAGATGGTGTACG |
| | AGGATACCCTGACACTGTTCCCATTCAGCGGCGAGACAGTGTTCATGAGCATGGAAAACCCCGGCCTGTGGATTCTGGGCTGTCACAACAGCGACTTC |
| | CGGAACAGAGGCATGACAGCCCTGCTGAAGGTGTCCAGCTGCGACAAGAACACCGGCGACTACTACGAGGACAGCTATGAGGACATCAGCGCCTACCT |
| | GCTGAGCAAGAACAATGCCATCGAGCCCAGAAGCTTCAGCCAGAATAGCAGACACCCCTCCACCAGACAGAAGCAGTTCAACGCCACAACAATCCCCG |
| | AGAACGACATCGAGAAAACCGATCCTTGGTTTGCCCACAGAACCCCTATGCCTAAGATCCAGAACGTGTCCTCCAGCGATCTGCTGATGCTCCTGAGA |
| | CAGAGCCCTACACCTCACGGACTGAGCCTGTCCGATCTGCAAGAGGCCAAATACGAAACCTTCAGCGACGACCCTTCTCCTGGCGCCATCGACAGCAA |
| | CAATAGCCTGAGCGAGATGACCCACTTCAGACCACAGCTGCACCACAGCGGCGACATGGTGTTTACACCTGAGAGCGGCCTCCAGCTGAGACTGAATG |
| | AGAAGCTGGGAACCACCGCCGCCACCGAGCTGAAGAAACTGGACTTCAAGGTGTCCTCTACCAGCAACAACCTGATCAGCACAATCCCCTCCGACAAC |
| | CTGGCTGCCGGCACCGACAACACATCTTCTCTGGGCCCACCTAGCATGCCCGTGCACTACGATAGCCAGCTGGATACCACACTGTTCGGCAAGAAGTC |
| | TAGCCCTCTGACAGAGTCTGGCGGCCCTCTGTCTCTGAGCGAGGAAAACAACGACAGCAAGCTGCTGGAATCCGGCCTGATGAACAGCCAAGAGTCCT |
| | CCTGGGGCAAGAATGTGTCCAGCACCGAGTCCGGCAGACTGTTCAAGGGAAAGAGAGCCCACGGACCTGCTCTGCTGACCAAGGATAACGCCCTGTTC |
| | AAAGTGTCCATCAGCCTGCTCAAGACCAACAAGACCTCCAACAACTCCGCCACCAACAGAAAGACCCACATCGACGGCCCTAGCCTGCTGATCGAGAA |
| | TAGCCCTAGCGTCTGGCAGAATATCCTGGAAAGCGACACCGAGTTCAAGAAAGTGACCCCTCTGATCCACGACCGGATGCTCATGGACAAGAACGCCA |
| | CCGCTCTGCGGCTGAACCACATGAGCAACAAGACAACCAGCAGCAAGAATATGGAAATGGTGCAGCAGAAGAAAGAGGGCCCCATTCCTCCAGACGCT |
| | CAGAACCCCGATATGAGCTTCTTCAAGATGCTCTTTCTGCCCGAGAGCGCCCGGTGGATTCAGAGAACACACGGCAAGAACTCCCTGAACTCCGGCCA |
| | GGGACCTTCTCCAAAGCAGCTGGTTTCCCTGGGACCTGAGAAGTCCGTGGAAGGACAGAACTTCCTGAGCGAAAAGAACAAAGTGGTCGTCGGCAAGG |
| | GCGAGTTCACCAAGGATGTGGGCCTGAAAGAGATGGTCTTTCCCAGCAGCCGGAACCTGTTCCTGACCAACCTGGACAACCTGCACGAGAACAACACC |
| | CACAATCAAGAGAAGAAGATCCAAGAGGAAATCGAAAAGAAAGAGACACTCATCCAAGAGAACGTGGTGCTGCCTCAGATCCACACAGTGACCGGCAC |
| | CAAGAACTTTATGAAGAATCTGTTCCTGCTGAGTACCCGGCAGAACGTGGAAGGCAGCTACGATGGCGCTTATGCCCCTGTGCTGCAGGACTTCAGAT |
| | CCCTGAACGACTCCACCAATCGGACAAAGAAGCACACAGCCCACTTCTCCAAGAAGGGCGAAGAAGAGAACCTGGAAGGACTGGGCAATCAGACCAAG |
| | CAGATCGTCGAGAAGTACGCCTGCACCACCAGAATCAGCCCCAACACAAGCCAGCAGAACTTCGTGACCCAGCGGAGCAAAAGAGCCCTGAAGCAGTT |
| | TCGGCTGCCCCTGGAAGAAACCGAGCTGGAAAAGCGGATCATCGTGGACGACACCAGCACACAGTGGTCCAAGAACATGAAGCACTTGACCCCTAGCA |
| | CACTGACCCAGATCGACTACAACGAGAAAGAGAAGGGCGCTATCACACAGAGCCCACTGAGCGACTGTCTGACCAGAAGCCACAGCATCCCTCAGGCC |
| | AACAGATCCCCTCTGCCAATCGCCAAAGTGTCTAGCTTCCCCAGCATCAGACCCATCTACCTGACCAGAGTGCTGTTCCAGGACAACAGCAGCCATCT |
| | GCCAGCCGCCAGCTACCGGAAGAAAGATTCTGGCGTGCAAGAGAGCAGCCACTTTCTGCAGGGCGCTAAGAAGAACAATCTGAGCCTGGCTATTCTGA |
| | CCCTGGAAATGACCGGCGATCAGAGAGAAGTCGGCTCTCTGGGCACCAGCGCCACAAATAGCGTGACCTACAAAAAGGTGGAAAACACCGTGCTGCCT |
| | AAGCCTGACCTGCCAAAGACAAGCGGCAAGGTGGAACTGCTGCCAAAGGTGCACATCTACCAGAAGGACCTGTTTCCTACCGAGACAAGCAACGGCTC |
| | TCCCGGCCATCTGGATCTGGTGGAAGGATCTCTGCTGCAGGGAACCGAGGGCGCCATCAAGTGGAACGAGGCCAATAGACCTGGCAAGGTGCCCTTCC |
| | TGAGAGTGGCCACAGAGTCCAGCGCCAAGACACCCTCTAAACTGCTGGACCCTCTGGCCTGGGACAACCACTATGGCACTCAGATCCCCAAAGAGGAA |
| | TGGAAGTCCCAAGAGAAGTCCCCTGAAAAGACCGCCTTCAAGAAGAAGGACACCATTCTGTCCCTGAATGCCTGCGAGAGCAACCACGCCATTGCCGC |
| | CATCAATGAGGGCCAGAACAAGCCCGAGATCGAAGTGACCTGGGCCAAGCAGGGAAGAACCGAGAGACTGTGTAGCCAGAATCCTCCTGTGCTGAAGC |
| | GGCACCAGAGAGAAATCACCCGGACCACACTGCAGAGCGACCAAGAAGAGATCGATTACGACGATACCATCAGCGTCGAGATGAAGAAAGAAGATTTC |
| | GACATCTACGACGAGGACGAGAATCAGAGCCCTCGGAGCTTCCAGAAGAAAACCAGGCACTACTTTATTGCCGCCGTCGAGCGGCTGTGGGACTACGG |
| | AATGTCTAGCTCTCCTCACGTGCTGCGGAATAGAGCCCAGTCTGGTAGCGTGCCCCAGTTCAAAAAGGTCGTGTTCCAAGAGTTCACCGACGGCAGCT |
| | TCACCCAGCCACTGTATAGAGGCGAGCTGAACGAGCATCTGGGCCTGCTGGGCCCTTATATCAGAGCCGAAGTGGAAGATAACATCATGGTCACCTTC |
| | CGGAATCAGGCTAGCCGGCCTTACAGCTTCTACAGCTCCCTGATCTCCTACGAAGAGGACCAGAGACAGGGCGCAGAGCCCCGGAAGAATTTCGTGAA |
| | GCCCAACGAGACTAAGACCTACTTTTGGAAGGTGCAGCACCATATGGCCCCTACAAAGGACGAGTTCGACTGCAAAGCCTGGGCCTACTTCTCCGATG |
| | TGGACCTCGAAAAGGACGTGCACAGCGGACTCATCGGCCCACTGCTTGTGTGCCACACCAACACACTGAACCCCGCTCACGGCAGACAAGTGACAGTG |
| | CAAGAGTTCGCCCTGTTTTTCACCATCTTCGACGAAACGAAGTCCTGGTACTTCACCGAAAACATGGAAAGAAACTGCAGGGCCCCTTGCAACATTCA |
| | GATGGAAGATCCCACCTTCAAAGAGAACTACCGGTTCCACGCCATCAACGGCTACATCATGGACACACTGCCCGGCCTGGTTATGGCCCAGGATCAGA |
| | GAATCCGGTGGTATCTGCTGTCCATGGGCTCCAACGAGAATATCCACTCCATCCACTTCAGCGGCCACGTGTTCACCGTGCGGAAAAAAGAAGAGTAC |
| | AAAATGGCCCTGTACAATCTGTACCCTGGGGTGTTCGAAACCGTTGAGATGCTGCCTAGCAAGGCCGGAATTTGGAGAGTGGAATGTCTGATTGGAGA |
| | GCACCTCCACGCCGGGATGAGCACCCTGTTTCTGGTGTACTCCAACAAGTGTCAGACCCCTCTCGGCATGGCCTCTGGCCACATTAGAGACTTCCAGA |
| | TCACCGCCAGCGGACAGTATGGACAGTGGGCCCCTAAACTGGCCAGACTGCACTACTCCGGCAGCATCAATGCCTGGTCCACCAAAGAGCCTTTCAGC |
| | TGGATCAAAGTGGACCTGCTGGCTCCCATGATCATCCACGGAATCAAGACCCAGGGCGCCAGACAAAAGTTCAGCAGCCTGTACATCAGCCAGTTCAT |
| | CATCATGTACAGCCTGGACGGAAAGAAGTGGCAGACCTACCGGGGCAATAGCACCGGCACACTGATGGTGTTCTTCGGCAACGTGGACTCCAGCGGCA |
| | TTAAGCACAACATCTTCAACCCTCCAATCATTGCCCGGTACATCCGGCTGCACCCCACACACTACAGCATCAGGTCTACCCTGAGAATGGAACTGATG |
| | GGCTGCGACCTGAACAGCTGCTCTATGCCCCTCGGAATGGAAAGCAAGGCCATCAGCGACGCCCAGATCACAGCCTCTAGCTACTTCACCAACATGTT |
| | CGCCACTTGGAGCCCCTCTAAGGCCCGGCTTCATCTGCAAGGCAGAAGCAACGCTTGGAGGCCCCAAGTGAACAACCCCAAAGAATGGCTCCAGGTGG |
| | ACTTTCAGAAAACCATGAAAGTGACAGGCGTGACCACACAGGGCGTCAAGTCCCTGCTGACCTCTATGTACGTGAAAGAGTTTCTGATCAGCTCCAGC |
| | CAGGACGGCCACCAGTGGACCCTGTTCTTCCAGAACGGCAAAGTGAAAGTGTTCCAGGGAAATCAGGACAGCTTCACACCCGTGGTCAATAGTCTGGA |
| | CCCACCACTGCTGACCCGCTACCTGCGAATTCACCCTCAGTCTTGGGTGCACCAGATTGCCCTGCGGATGGAAGTGCTGGGCTGTGAAGCTCAGGACC |
| | TCTACTAGTTAATTAAGAGCATCTTACCGCCATTTATTCCCATATTTGTTCTGTTTTTCTTGATTTGGGTATACATTTAAATGTTAATAAAACAAAAT |
| | GGTGGGGCAATCATTTACATTTTTAGGGATATGTAATTACTAGTTCAGGTGTATTGCCACAAGACAAACATGTTAAGAAACTTTCCCGTTATTTACGC |
| | TCTGTTCCTGTTAATCAACCTCTGGATTACAAAATTTGTGAAAGATTGACTGATATTCTTAACTATGTTGCTCCTTTTACGCTGTGTGGATATGCTGC |
| | TTTATAGCCTCTGTATCTAGCTATTGCTTCCCGTACGGCTTTCGTTTTCTCCTCCTTGTATAAATCCTGGTTGCTGTCTCTTTTAGAGGAGTTGTGGC |
| | CCGTTGTCCGTCAACGTGGCGTGGTGTGCTCTGTGTTTGCTGACGCAACCCCCACTGGCTGGGGCATTGCCACCACCTGTCAACTCCTTTCTGGGACT |
| | TTCGCTTTCCCCCTCCCGATCGCCACGGCAGAACTCATCGCCGCCTGCCTTGCCCGCTGCTGGACAGGGGCTAGGTTGCTGGGCACTGATAATTCCGT |
| | GGTGTTGTCTGTGCCTTCTAGTTGCCAGCCATCTGTTGTTTGCCCCTCCCCCGTGCCTTCCTTGACCCTGGAAGGTGCCACTCCCACTGTCCTTTCCT |
| | AATAAAATGAGGAAATTGCATCGCATTGTCTGAGTAGGTGTCATTCTATTCTGGGGGGTGGGGTGGGGCAGGACAGCAAGGGGGAGGATTGGGAAGAC |
| | AATAGCAGGCATGCTGGGGATGCGGTGGGCTCTATGGCTCTAGAGCATGGCTACGTAGATAAGTAGCATGGCGGGTTAATCATTAACTACACCTGCAG |
| | GAGGAACCCCTAGTGATGGAGTTGGCCACTCCCTCTCTGCGCGCTCGCTCGCTCACTGAGGCCGGGCGACCAAAGGTCGCCCGACGCCCGGGCGGCCT |
| | CAGTGAGCGAGCGAGCGCGCAGCTGCCTGCAGGGGCGCGCCTCGAGGCATGCGGTACCAAGCTTGTCGAGAAGTACTAGAGGATCATAATCAGCCATA |
| | CCACATTTGTAGAGGTTTTACTTGCTTTAAAAAACCTCCCACACCTCCCCCTGAACCTGAAACATAAAATGAATGCAATTGTTGTTGTTAACTTGTTT |
| | ATTGCAGCTTATAATGGTTACAAATAAAGCAATAGCATCACAAATTTCACAAATAAAGCATTTTTTTCACTGCATTCTAGTTGTGGTTTGTCCAAACT |
| | CATCAATGTATCTTATCATGTCTGGATCTGATCACTGATATCGCCTAGGAGATCCGAACCAGATAAGTGAAATCTAGTTCCAAACTATTTTGTCATTT |
| | TTAATTTTCGTATTAGCTTACGACGCTACACCCAGTTCCCATCTATTTTGTCACTCTTCCCTAAATAATCCTTAAAAACTCCATTTCCACCCCTCCCA |
| | GTTCCCAACTATTTTGTCCGCCCACAGCGGGGCATTTTTCTTCCTGTTATGTTTTTAATCAAACATCCTGCCAACTCCATGTGACAAACCGTCATCTT |
| | CGGCTACTTTTTCTCTGTCACAGAATGAAAATTTTTCTGTCATCTCTTCGTTATTAATGTTTGTAATTGACTGAATATCAACGCTTATTTGCAGCCTG |
| | AATGGCGAATGG |
| ceDNAFVIII- | GACGCGCCCTGTAGCGGCGCATTAAGCGCGGCGGGTGTGGTGGTTACGCGCAGCGTGACCGCTACACTTGCCAGCGCCCTAGCGCCCGCTCCTTTCGC |
| vector 4 | TTTCTTCCCTTCCTTTCTCGCCACGTTCGCCGGCTTTCCCCGTCAAGCTCTAAATCGGGGGCTCCCTTTAGGGTTCCGATTTAGTGCTTTACGGCACC |
| (SEQ ID NO: | TCGACCCCAAAAAACTTGATTAGGGTGATGGTTCACGTAGTGGGCCATCGCCCTGATAGACGGTTTTTCGCCCTTTGACGTTGGAGTCCACGTTCTTT |
| 195) | AATAGTGGACTCTTGTTCCAAACTGGAACAACACTCAACCCTATCTCGGTCTATTCTTTTGATTTATAAGGGATTTTGCCGATTTCGGCCTATTGGTT |
| | AAAAAATGAGCTGATTTAACAAAAATTTAACGCGAATTTTAACAAAATATTAACGTTTACAATTTCAGGTGGCACTTTTCGGGGAAATGTGCGCGGAA |
| | CCCCTATTTGTTTATTTTTCTAAATACATTCAAATATGTATCCGCTCATGAGACAATAACCCTGATAAATGCTTCAATAATATTGAAAAAGGAAGAGT |
| | ATGAGTATTCAACATTTCCGTGTCGCCCTTATTCCCTTTTTTGCGGCATTTTGCCTTCCTGTTTTTGCTCACCCAGAAACGCTGGTGAAAGTAAAAGA |
| | TGCTGAAGATCAGTTGGGTGCACGAGTGGGTTACATCGAACTGGATCTCAACAGCGGTAAGATCCTTGAGAGTTTTCGCCCCGAAGAACGTTTTCCAA |
| | TGATGAGCACTTTTAAAGTTCTGCTATGTGGCGCGGTATTATCCCGTATTGACGCCGGGCAAGAGCAACTCGGTCGCCGCATACACTATTCTCAGAAT |
| | GACTTGGTTGAGTACTCACCAGTCACAGAAAAGCATCTTACGGATGGCATGACAGTAAGAGAATTATGCAGTGCTGCCATAACCATGAGTGATAACAC |
| | TGCGGCCAACTTACTTCTGACAACGATCGGAGGACCGAAGGAGCTAACCGCTTTTTTGCACAACATGGGGGATCATGTAACTCGCCTTGATCGTTGGG |
| | AACCGGAGCTGAATGAAGCCATACCAAACGACGAGCGTGACACCACGATGCCTGTAGCAATGGCAACAACGTTGCGCAAACTATTAACTGGCGAACTA |
| | CTTACTCTAGCTTCCCGGCAACAATTAATAGACTGGATGGAGGCGGATAAAGTTGCAGGACCACTTCTGCGCTCGGCCCTTCCGGCTGGCTGGTTTAT |
| | TGCTGATAAATCTGGAGCCGGTGAGCGTGGGTCTCGCGGTATCATTGCAGCACTGGGGCCAGATGGTAAGCCCTCCCGTATCGTAGTTATCTACACGA |
| | CGGGGAGTCAGGCAACTATGGATGAACGAAATAGACAGATCGCTGAGATAGGTGCCTCACTGATTAAGCATTGGTAACTGTCAGACCAAGTTTACTCA |
| | TATATACTTTAGATTGATTTAAAACTTCATTTTTAATTTAAAAGGATCTAGGTGAAGATCCTTTTTGATAATCTCATGACCAAAATCCCTTAACGTGA |
| | GTTTTCGTTCCACTGAGCGTCAGACCCCGTAGAAAAGATCAAAGGATCTTCTTGAGATCCTTTTTTTCTGCGCGTAATCTGCTGCTTGCAAACAAAAA |
| | AACCACCGCTACCAGCGGTGGTTTGTTTGCCGGATCAAGAGCTACCAACTCTTTTTCCGAAGGTAACTGGCTTCAGCAGAGCGCAGATACCAAATACT |
| | GTCCTTCTAGTGTAGCCGTAGTTAGGCCACCACTTCAAGAACTCTGTAGCACCGCCTACATACCTCGCTCTGCTAATCCTGTTACCAGTGGCTGCTGC |
| | CAGTGGCGATAAGTCGTGTCTTACCGGGTTGGACTCAAGACGATAGTTACCGGATAAGGCGCAGCGGTCGGGCTGAACGGGGGGTTCGTGCACACAGC |
| | CCAGCTTGGAGCGAACGACCTACACCGAACTGAGATACCTACAGCGTGAGCATTGAGAAAGCGCCACGCTTCCCGAAGGGAGAAAGGCGGACAGGTAT |
| | CCGGTAAGCGGCAGGGTCGGAACAGGAGAGCGCACGAGGGAGCTTCCAGGGGGAAACGCCTGGTATCTTTATAGTCCTGTCGGGTTTCGCCACCTCTG |
| | ACTTGAGCGTCGATTTTTGTGATGCTCGTCAGGGGGGCGGAGCCTATGGAAAAACGCCAGCAACGCGGCCTTTTTACGGTTCCTGGCCTTTTGCTGGC |
| | CTTTTGCTCACATGTTCTTTCCTGCGTTATCCCCTGATTCTGTGGATAACCGTATTACCGCCTTTGAGTGAGCTGATACCGCTCGCCGCAGCCGAACG |
| | ACCGAGCGCAGCGAGTCAGTGAGCGAGGAAGCGGAAGAGCGCCTGATGCGGTATTTTCTCCTTACGCATCTGTGCGGTATTTCACACCGCAGACCAGC |
| | CGCGTAACCTGGCAAAATCGGTTACGGTTGAGTAATAAATGGATGCCCTGCGTAAGCGGGTGTGGGCGGACAATAAAGTCTTAAACTGAACAAAATAG |
| | ATCTAAACTATGACAATAAAGTCTTAAACTAGACAGAATAGTTGTAAACTGAAATCAGTCCAGTTATGCTGTGAAAAAGCATACTGGACTTTTGTTAT |
| | GGCTAAAGCAAACTCTTCATTTTCTGAAGTGCAAATTGCCCGTCGTATTAAAGAGGGGCGTGGCCAAGGGCATGGTAAAGACTATATTCGCGGCGTTG |
| | TGACAATTTACCGAACAACTCCGCGGCCGGGAAGCCGATCTCGGCTTGAACGAATTGTTAGGTGGCGGTACTTGGGTCGATATCAAAGTGCATCACTT |
| | CTTCCCGTATGCCCAACTTTGTATAGAGAGCCACTGCGGGATCGTCACCGTAATCTGCTTGCACGTAGATCACATAAGCACCAAGCGCGTTGGCCTCA |
| | TGCTTGAGGAGATTGATGAGCGCGGTGGCAATGCCCTGCCTCCGGTGCTCGCCGGAGACTGCGAGATCATAGATATAGATCTCACTACGCGGCTGCTC |
| | AAACCTGGGCAGAACGTAAGCCGCGAGAGCGCCAACAACCGCTTCTTGGTCGAAGGCAGCAAGCGCGATGAATGTCTTACTACGGAGCAAGTTCCCGA |
| | GGTAATCGGAGTCCGGCTGATGTTGGGAGTAGGTGGCTACGTCTCCGAACTCACGACCGAAAAGATCAAGAGCAGCCCGCATGGATTTGACTTGGTCA |
| | GGGCCGAGCCTACATGTGCGAATGATGCCCATACTTGAGCCACCTAACTTTGTTTTAGGGCGACTGCCCTGCTGCGTAACATCGTTGCTGCTGCGTAA |
| | CATCGTTGCTGCTCCATAACATCAAACATCGACCCACGGCGTAACGCGCTTGCTGCTTGGATGCCCGAGGCATAGACTGTACAAAAAAACAGTCATAA |
| | CAAGCCATGAAAACCGCCACTGCGCCGTTACCACCGCTGCGTTCGGTCAAGGTTCTGGACCAGTTGCGTGAGCGCATACGCTACTTGCATTACAGTTT |
| | ACGAACCGAACAGGCTTATGTCAACTGGGTTCGTGCCTTCATCCGTTTCCACGGTGTGCGTCACCCGGCAACCTTGGGCAGCAGCGAAGTCGAGGCAT |
| | TTCTGTCCTGGCTGGCGAACGAGCGCAAGGTTTCGGTCTCCACGCATCGTCAGGCATTGGCGGCCTTGCTGTTCTTCTACGGCAAGGTGCTGTGCACG |
| | GATCTGCCCTGGCTTCAGGAGATCGGAAGACCTCGGCCGTCGCGGCGCTTGCCGGTGGTGCTGACCCCGGATGAAGTGGTTCGCATCCTCGGTTTTCT |
| | GGAAGGCGAGCATCGTTTGTTCGCCCAGGACTCTAGCTATAGTTCTAGTGGTTGGCTACGTATACTCCGGAATATTAATAGATCATGGAGATAATTAA |
| | AATGATAACCATCTCGCAAATAAATAAGTATTTTACTGTTTTCGTAACAGTTTTGTAATAAAAAAACCTATAAATATTCCGGATTATTCATACCGTCC |
| | CACCATCGGGCGCGGATCTCGGTCCGAAACCATGTCGTACTACCATCACCATCACCATCACGATTACGATATCCCAACGACCGAAAACCTGTATTTTC |
| | AGGGCGCCATGGGATCCGGCCGGCCCCTGCAGGCAGCTGCGCGCTCGCTCGCTCACTGAGGCCGCCCGGGCAAAGCCCGGGCGTCGGGCGACCTTTGG |
| | TCGCCCGGCCTCAGTGAGCGAGCGAGCGCGCAGAGAGGGAGTGGCCAACTCCATCACTAGGGGTTCCTTGTAGTTAATGATTAACCCGCCATGCTACT |
| | TATCTACGTAGCCATGCTCTAGAGCGGCCGCCCCTAAAATGGGCAAACATTGCAAGCAGCAAACAGCAAACACACAGCCCTCCCTGCCTGCTGACCTT |
| | GGAGCTGGGGCAGAGGTCAGAGACCTCTCTGGGCCCATGCCACCTCCAACATCCACTCGACCCCTTGGAATTTTTCGGTGGAGAGGAGCAGAGGTTGT |
| | CCTGGCGTGGTTTAGGTAGTGTGAGAGGGGAATGACTCCTTTCGGTAAGTGCAGTGGAAGCTGTACACTGCCCAGGCAAAGCGTCCGGGCAGCGTAGG |
| | CGGGCGACTCAGATCCCAGCCAGTGGACTTAGCCCCTGTTTGCTCCTCCGATAACTGGGGTGACCTTGGTTAATATTCACCAGCAGCCTCCCCCGTTG |
| | CCCCTCTGGATCCACTGCTTAAATACGGACGAGGACAGGGCCCTGTCTCCTCAGCTTCAGGCACCACCACTGACCTGGGACAGTGAATCCGGACTCTA |
| | AGGTAAATATAAAATTTTTAAGTGTATAATGTGTTAAACTACTGATTCTAATTGTTTCTCTCTTTTAGATTCCAACCTTTGGAACTGAGTTTAAACCG |
| | CAGCCACCATGCAGATCGAGCTGTCTACCTGCTTCTTCCTGTGCCTGCTGCGGTTCTGCTTCAGCGCCACCAGAAGATATTACCTGGGCGCCGTGGAA |
| | CTGAGCTGGGACTACATGCAGTCTGACCTGGGAGAGCTGCCCGTGGACGCTAGATTTCCTCCAAGAGTGCCCAAGAGCTTCCCCTTCAACACCTCCGT |
| | GGTGTACAAGAAAACCCTGTTCGTGGAATTCACCGACCACCTGTTCAATATCGCCAAGCCTCGGCCTCCTTGGATGGGACTGCTGGGACCTACAATTC |
| | AGGCCGAGGTGTACGACACCGTGGTCATCACCCTGAAGAACATGGCCAGCCATCCTGTGTCTCTGCACGCCGTGGGAGTGTCTTATTGGAAGGCTTCT |
| | GAGGGCGCCGAGTACGACGATCAGACAAGCCAGAGAGAGAAAGAGGACGACAAGGTTTTCCCTGGCGGCAGCCACACCTATGTCTGGCAGGTCCTGAA |
| | AGAAAACGGCCCTATGGCCTCCGATCCTCTGTGCCTGACATACAGCTACCTGAGCCACGTGGACCTGGTCAAGGACCTGAATTCTGGCCTGATCGGAG |
| | CCCTGCTCGTGTGTAGAGAAGGCAGCCTGGCCAAAGAGAAAACCCAGACACTGCACAAGTTCATCCTGCTGTTCGCCGTGTTCGACGAGGGCAAGAGC |
| | TGGCACAGCGAGACAAAGAACAGCCTGATGCAGGACAGGGATGCCGCCTCTGCTAGAGCTTGGCCTAAGATGCACACCGTGAACGGCTACGTGAACAG |
| | AAGCCTGCCTGGACTGATCGGCTGCCACAGAAAGTCCGTGTACTGGCACGTGATCGGCATGGGCACAACACCTGAGGTGCACAGCATCTTTCTGGAAG |
| | GCCACACCTTCCTCGTGCGGAACCACAGACAGGCCAGCCTGGAAATCAGCCCTATCACCTTCCTGACCGCTCAGACCCTGCTGATGGATCTGGGCCAG |
| | TTTCTGCTGTTCTGCCACATCAGCTCCCACCAGCACGATGGCATGGAAGCCTACGTGAAGGTGGACAGCTGCCCCGAAGAACCCCAGCTGCGGATGAA |
| | GAACAACGAGGAAGCCGAGGACTACGACGACGACCTGACCGACTCTGAGATGGACGTCGTCAGATTCGACGACGATAACAGCCCCAGCTTCATCCAGA |
| | TCAGAAGCGTGGCCAAGAAGCACCCCAAGACCTGGGTGCACTATATCGCCGCCGAGGAAGAGGACTGGGATTACGCTCCTCTGGTGCTGGCCCCTGAC |
| | GACAGAAGCTACAAGAGCCAGTACCTGAACAACGGCCCTCAGCGGATCGGCCGGAAGTATAAGAAAGTGCGGTTCATGGCCTACACCGACGAGACATT |
| | CAAGACCAGAGAGGCCATCCAGCACGAGAGCGGAATTCTGGGCCCTCTGCTGTATGGCGAAGTGGGCGATACACTGCTGATCATCTTCAAGAACCAGG |
| | CCAGCAGACCCTACAACATCTACCCTCACGGCATCACCGATGTGCGGCCCCTGTATTCTAGAAGGCTGCCCAAGGGCGTGAAGCACCTGAAGGACTTC |
| | CCTATCCTGCCTGGCGAGATTTTCAAGTACAAGTGGACCGTGACCGTGGAAGATGGCCCCACCAAGAGCGACCCTAGATGTCTGACACGGTACTACAG |
| | CAGCTTCGTGAACATGGAACGCGACCTGGCCAGCGGCCTGATTGGACCTCTGCTGATCTGCTACAAAGAAAGCGTGGACCAGCGGGGCAACCAGATCA |
| | TGAGCGACAAGCGGAACGTGATCCTGTTTAGCGTGTTCGATGAGAACCGGTCCTGGTATCTGACCGAGAACATCCAGCGGTTTCTGCCCAATCCTGCC |
| | GGGGTGCAACTGGAAGATCCTGAGTTCCAGGCAAGCAACATCATGCACTCCATCAATGGCTATGTGTTCGACAGCCTGCAGCTGAGCGTGTGCCTGCA |
| | CGAAGTGGCCTACTGGTACATCCTGAGCATTGGCGCCCAGACCGACTTCCTGTCCGTGTTCTTTAGCGGCTACACCTTCAAGCACAAGATGGTGTACG |
| | AGGATACCCTGACACTGTTCCCATTCAGCGGCGAGACAGTGTTCATGAGCATGGAAAACCCCGGCCTGTGGATTCTGGGCTGTCACAACAGCGACTTC |
| | CGGAACAGAGGCATGACAGCCCTGCTGAAGGTGTCCAGCTGCGACAAGAACACCGGCGACTACTACGAGGACAGCTATGAGGACATCAGCGCCTACCT |
| | GCTGAGCAAGAACAATGCCATCGAGCCTCGGAGCTTCAGCCAGAATCCTCCTGTGCTGAAGCGGCACCAGCGCGAGATCACCAGAACAACCCTGCAGA |
| | GCGACCAAGAGGAAATCGATTACGACGACACCATCAGCGTCGAGATGAAGAAAGAAGATTTCGACATCTACGACGAGGACGAGAATCAGAGCCCCAGA |
| | AGCTTTCAGAAAAAGACCCGGCACTACTTCATTGCCGCCGTCGAGAGACTGTGGGACTACGGCATGTCTAGCAGCCCTCACGTGCTGAGAAATAGAGC |
| | CCAGAGCGGCAGCGTGCCCCAGTTCAAGAAAGTGGTGTTCCAAGAGTTCACCGACGGCAGCTTCACCCAGCCACTGTATAGAGGCGAGCTGAACGAGC |
| | ATCTGGGCCTGCTGGGCCCTTATATCAGAGCCGAAGTGGAAGATAACATCATGGTCACCTTCCGGAATCAGGCTAGCCGGCCTTACAGCTTCTACAGC |
| | TCCCTGATCAGCTACGAAGAGGACCAGAGACAGGGCGCTGAGCCCAGAAAGAACTTCGTGAAGCCCAACGAGACTAAGACCTACTTTTGGAAGGTGCA |
| | GCACCACATGGCCCCTACAAAGGACGAGTTCGACTGCAAAGCCTGGGCCTACTTCTCCGATGTGGATCTGGAAAAGGACGTGCACAGCGGGCTCATCG |
| | GACCACTGCTTGTGTGCCACACCAACACACTGAACCCCGCTCACGGCAGACAAGTGACAGTGCAAGAGTTCGCCCTGTTCTTCACCATCTTCGACGAA |
| | ACAAAGAGCTGGTACTTCACCGAGAATATGGAACGGAACTGCAGAGCCCCTTGCAACATCCAGATGGAAGATCCCACCTTCAAAGAGAACTACCGGTT |
| | CCACGCCATCAACGGCTACATCATGGACACACTGCCCGGCCTGGTTATGGCCCAGGATCAGAGAATCCGGTGGTATCTGCTGTCCATGGGCTCCAACG |
| | AGAATATCCACAGCATCCACTTCAGCGGCCACGTGTTCACCGTGCGGAAAAAAGAAGAGTACAAAATGGCCCTGTACAATCTGTACCCTGGGGTGTTC |
| | GAAACCGTGGAAATGCTGCCTTCCAAGGCCGGCATTTGGAGAGTGGAATGTCTGATTGGAGAGCACCTCCACGCCGGAATGAGCACCCTGTTTCTGGT |
| | GTACAGCAACAAGTGTCAGACCCCTCTCGGCATGGCCTCTGGACACATCAGAGACTTCCAGATCACCGCCTCTGGCCAGTACGGACAGTGGGCTCCTA |
| | AACTGGCTCGGCTGCACTACAGCGGCAGCATCAATGCCTGGTCCACCAAAGAGCCCTTCAGCTGGATCAAGGTGGACCTGCTGGCTCCCATGATCATC |
| | CACGGAATCAAGACCCAGGGCGCCAGACAGAAGTTCAGCAGCCTGTACATCAGCCAGTTCATCATCATGTACAGCCTGGACGGCAAGAAGTGGCAGAC |
| | CTACAGAGGCAACAGCACCGGCACACTCATGGTGTTCTTCGGCAACGTGGACTCCAGCGGCATTAAGCACAACATCTTCAACCCTCCAATCATTGCCC |
| | GGTACATCCGGCTGCACCCCACACACTACAGCATCCGGTCTACCCTGAGAATGGAACTGATGGGCTGCGACCTGAACAGCTGCTCTATGCCCCTCGGA |
| | ATGGAAAGCAAGGCCATCAGCGACGCCCAGATCACAGCCAGCAGCTACTTCACCAACATGTTCGCCACTTGGAGCCCCTCCAAGGCTAGACTGCATCT |
| | GCAGGGCAGAAGCAACGCTTGGAGGCCCCAAGTGAACAACCCCAAAGAGTGGCTGCAGGTTGACTTTCAAAAGACCATGAAAGTGACCGGCGTGACCA |
| | CACAGGGCGTCAAGTCTCTGCTGACCTCTATGTACGTGAAAGAGTTCCTGATCTCCAGCAGCCAGGACGGCCATCAGTGGACCCTGTTTTTCCAGAAC |
| | GGCAAAGTGAAAGTGTTCCAGGGCAATCAGGACAGCTTCACACCCGTGGTCAATTCTCTGGACCCTCCACTGCTGACCAGATACCTGCGGATTCACCC |
| | TCAGTCTTGGGTGCACCAGATCGCTCTGCGGATGGAAGTGCTGGGCTGTGAAGCTCAGGACCTCTACTAGTTAATTAAGAGCATCTTACCGCCATTTA |
| | TTCCCATATTTGTTCTGTTTTTCTTGATTTGGGTATACATTTAAATGTTAATAAAACAAAATGGTGGGGCAATCATTTACATTTTTAGGGATATGTAA |
| | TTACTAGTTCAGGTGTATTGCCACAAGACAAACATGTTAAGAAACTTTCCCGTTATTTACGCTCTGTTCCTGTTAATCAACCTCTGGATTACAAAATT |
| | TGTGAAAGATTGACTGATATTCTTAACTATGTTGCTCCTTTTACGCTGTGTGGATATGCTGCTTTATAGCCTCTGTATCTAGCTATTGCTTCCCGTAC |
| | GGCTTTCGTTTTCTCCTCCTTGTATAAATCCTGGTTGCTGTCTCTTTTAGAGGAGTTGTGGCCCGTTGTCCGTCAACGTGGCGTGGTGTGCTCTGTGT |
| | TTGCTGACGCAACCCCCACTGGCTGGGGCATTGCCACCACCTGTCAACTCCTTTCTGGGACTTTCGCTTTCCCCCTCCCGATCGCCACGGCAGAACTC |
| | ATCGCCGCCTGCCTTGCCCGCTGCTGGACAGGGGCTAGGTTGCTGGGCACTGATAATTCCGTGGTGTTGTCTGTGCCTTCTAGTTGCCAGCCATCTGT |
| | TGTTTGCCCCTCCCCCGTGCCTTCCTTGACCCTGGAAGGTGCCACTCCCACTGTCCTTTCCTAATAAAATGAGGAAATTGCATCGCATTGTCTGAGTA |
| | GGTGTCATTCTATTCTGGGGGGTGGGGTGGGGCAGGACAGCAAGGGGGAGGATTGGGAAGACAATAGCAGGCATGCTGGGGATGCGGTGGGCTCTATG |
| | GCTCTAGAGCATGGCTACGTAGATAAGTAGCATGGCGGGTTAATCATTAACTACACCTGCAGGAGGAACCCCTAGTGATGGAGTTGGCCACTCCCTCT |
| | CTGCGCGCTCGCTCGCTCACTGAGGCCGGGCGACCAAAGGTCGCCCGACGCCCGGGCGGCCTCAGTGAGCGAGCGAGCGCGCAGCTGCCTGCAGGGGC |
| | GCGCCTCGAGGCATGCGGTACCAAGCTTGTCGAGAAGTACTAGAGGATCATAATCAGCCATACCACATTTGTAGAGGTTTTACTTGCTTTAAAAAACC |
| | TCCCACACCTCCCCCTGAACCTGAAACATAAAATGAATGCAATTGTTGTTGTTAACTTGTTTATTGCAGCTTATAATGGTTACAAATAAAGCAATAGC |
| | ATCACAAATTTCACAAATAAAGCATTTTTTTCACTGCATTCTAGTTGTGGTTTGTCCAAACTCATCAATGTATCTTATCATGTCTGGATCTGATCACT |
| | GATATCGCCTAGGAGATCCGAACCAGATAAGTGAAATCTAGTTCCAAACTATTTTGTCATTTTTAATTTTCGTATTAGCTTACGACGCTACACCCAGT |
| | TCCCATCTATTTTGTCACTCTTCCCTAAATAATCCTTAAAAACTCCATTTCCACCCCTCCCAGTTCCCAACTATTTTGTCCGCCCACAGCGGGGCATT |
| | TTTCTTCCTGTTATGTTTTTAATCAAACATCCTGCCAACTCCATGTGACAAACCGTCATCTTCGGCTACTTTTTCTCTGTCACAGAATGAAAATTTTT |
| | CTGTCATCTCTTCGTTATTAATGTTTGTAATTGACTGAATATCAACGCTTATTTGCAGCCTGAATGGCGAATGG |
| ceDNAFVIII- | GACGCGCCCTGTAGCGGCGCATTAAGCGCGGCGGGTGTGGTGGTTACGCGCAGCGTGACCGCTACACTTGCCAGCGCCCTAGCGCCCGCTCCTTTCGC |
| vector 5 | TTTCTTCCCTTCCTTTCTCGCCACGTTCGCCGGCTTTCCCCGTCAAGCTCTAAATCGGGGGCTCCCTTTAGGGTTCCGATTTAGTGCTTTACGGCACC |
| (SEQ ID NO: | TCGACCCCAAAAAACTTGATTAGGGTGATGGTTCACGTAGTGGGCCATCGCCCTGATAGACGGTTTTTCGCCCTTTGACGTTGGAGTCCACGTTCTTT |
| 196) | AATAGTGGACTCTTGTTCCAAACTGGAACAACACTCAACCCTATCTCGGTCTATTCTTTTGATTTATAAGGGATTTTGCCGATTTCGGCCTATTGGTT |
| | AAAAAATGAGCTGATTTAACAAAAATTTAACGCGAATTTTAACAAAATATTAACGTTTACAATTTCAGGTGGCACTTTTCGGGGAAATGTGCGCGGAA |
| | CCCCTATTTGTTTATTTTTCTAAATACATTCAAATATGTATCCGCTCATGAGACAATAACCCTGATAAATGCTTCAATAATATTGAAAAAGGAAGAGT |
| | ATGAGTATTCAACATTTCCGTGTCGCCCTTATTCCCTTTTTTGCGGCATTTTGCCTTCCTGTTTTTGCTCACCCAGAAACGCTGGTGAAAGTAAAAGA |
| | TGCTGAAGATCAGTTGGGTGCACGAGTGGGTTACATCGAACTGGATCTCAACAGCGGTAAGATCCTTGAGAGTTTTCGCCCCGAAGAACGTTTTCCAA |
| | TGATGAGCACTTTTAAAGTTCTGCTATGTGGCGCGGTATTATCCCGTATTGACGCCGGGCAAGAGCAACTCGGTCGCCGCATACACTATTCTCAGAAT |
| | GACTTGGTTGAGTACTCACCAGTCACAGAAAAGCATCTTACGGATGGCATGACAGTAAGAGAATTATGCAGTGCTGCCATAACCATGAGTGATAACAC |
| | TGCGGCCAACTTACTTCTGACAACGATCGGAGGACCGAAGGAGCTAACCGCTTTTTTGCACAACATGGGGGATCATGTAACTCGCCTTGATCGTTGGG |
| | AACCGGAGCTGAATGAAGCCATACCAAACGACGAGCGTGACACCACGATGCCTGTAGCAATGGCAACAACGTTGCGCAAACTATTAACTGGCGAACTA |
| | CTTACTCTAGCTTCCCGGCAACAATTAATAGACTGGATGGAGGCGGATAAAGTTGCAGGACCACTTCTGCGCTCGGCCCTTCCGGCTGGCTGGTTTAT |
| | TGCTGATAAATCTGGAGCCGGTGAGCGTGGGTCTCGCGGTATCATTGCAGCACTGGGGCCAGATGGTAAGCCCTCCCGTATCGTAGTTATCTACACGA |
| | CGGGGAGTCAGGCAACTATGGATGAACGAAATAGACAGATCGCTGAGATAGGTGCCTCACTGATTAAGCATTGGTAACTGTCAGACCAAGTTTACTCA |
| | TATATACTTTAGATTGATTTAAAACTTCATTTTTAATTTAAAAGGATCTAGGTGAAGATCCTTTTTGATAATCTCATGACCAAAATCCCTTAACGTGA |
| | GTTTTCGTTCCACTGAGCGTCAGACCCCGTAGAAAAGATCAAAGGATCTTCTTGAGATCCTTTTTTTCTGCGCGTAATCTGCTGCTTGCAAACAAAAA |
| | AACCACCGCTACCAGCGGTGGTTTGTTTGCCGGATCAAGAGCTACCAACTCTTTTTCCGAAGGTAACTGGCTTCAGCAGAGCGCAGATACCAAATACT |
| | GTCCTTCTAGTGTAGCCGTAGTTAGGCCACCACTTCAAGAACTCTGTAGCACCGCCTACATACCTCGCTCTGCTAATCCTGTTACCAGTGGCTGCTGC |
| | CAGTGGCGATAAGTCGTGTCTTACCGGGTTGGACTCAAGACGATAGTTACCGGATAAGGCGCAGCGGTCGGGCTGAACGGGGGGTTCGTGCACACAGC |
| | CCAGCTTGGAGCGAACGACCTACACCGAACTGAGATACCTACAGCGTGAGCATTGAGAAAGCGCCACGCTTCCCGAAGGGAGAAAGGCGGACAGGTAT |
| | CCGGTAAGCGGCAGGGTCGGAACAGGAGAGCGCACGAGGGAGCTTCCAGGGGGAAACGCCTGGTATCTTTATAGTCCTGTCGGGTTTCGCCACCTCTG |
| | ACTTGAGCGTCGATTTTTGTGATGCTCGTCAGGGGGGCGGAGCCTATGGAAAAACGCCAGCAACGCGGCCTTTTTACGGTTCCTGGCCTTTTGCTGGC |
| | CTTTTGCTCACATGTTCTTTCCTGCGTTATCCCCTGATTCTGTGGATAACCGTATTACCGCCTTTGAGTGAGCTGATACCGCTCGCCGCAGCCGAACG |
| | ACCGAGCGCAGCGAGTCAGTGAGCGAGGAAGCGGAAGAGCGCCTGATGCGGTATTTTCTCCTTACGCATCTGTGCGGTATTTCACACCGCAGACCAGC |
| | CGCGTAACCTGGCAAAATCGGTTACGGTTGAGTAATAAATGGATGCCCTGCGTAAGCGGGTGTGGGCGGACAATAAAGTCTTAAACTGAACAAAATAG |
| | ATCTAAACTATGACAATAAAGTCTTAAACTAGACAGAATAGTTGTAAACTGAAATCAGTCCAGTTATGCTGTGAAAAAGCATACTGGACTTTTGTTAT |
| | GGCTAAAGCAAACTCTTCATTTTCTGAAGTGCAAATTGCCCGTCGTATTAAAGAGGGGCGTGGCCAAGGGCATGGTAAAGACTATATTCGCGGCGTTG |
| | TGACAATTTACCGAACAACTCCGCGGCCGGGAAGCCGATCTCGGCTTGAACGAATTGTTAGGTGGCGGTACTTGGGTCGATATCAAAGTGCATCACTT |
| | CTTCCCGTATGCCCAACTTTGTATAGAGAGCCACTGCGGGATCGTCACCGTAATCTGCTTGCACGTAGATCACATAAGCACCAAGCGCGTTGGCCTCA |
| | TGCTTGAGGAGATTGATGAGCGCGGTGGCAATGCCCTGCCTCCGGTGCTCGCCGGAGACTGCGAGATCATAGATATAGATCTCACTACGCGGCTGCTC |
| | AAACCTGGGCAGAACGTAAGCCGCGAGAGCGCCAACAACCGCTTCTTGGTCGAAGGCAGCAAGCGCGATGAATGTCTTACTACGGAGCAAGTTCCCGA |
| | GGTAATCGGAGTCCGGCTGATGTTGGGAGTAGGTGGCTACGTCTCCGAACTCACGACCGAAAAGATCAAGAGCAGCCCGCATGGATTTGACTTGGTCA |
| | GGGCCGAGCCTACATGTGCGAATGATGCCCATACTTGAGCCACCTAACTTTGTTTTAGGGCGACTGCCCTGCTGCGTAACATCGTTGCTGCTGCGTAA |
| | CATCGTTGCTGCTCCATAACATCAAACATCGACCCACGGCGTAACGCGCTTGCTGCTTGGATGCCCGAGGCATAGACTGTACAAAAAAACAGTCATAA |
| | CAAGCCATGAAAACCGCCACTGCGCCGTTACCACCGCTGCGTTCGGTCAAGGTTCTGGACCAGTTGCGTGAGCGCATACGCTACTTGCATTACAGTTT |
| | ACGAACCGAACAGGCTTATGTCAACTGGGTTCGTGCCTTCATCCGTTTCCACGGTGTGCGTCACCCGGCAACCTTGGGCAGCAGCGAAGTCGAGGCAT |
| | TTCTGTCCTGGCTGGCGAACGAGCGCAAGGTTTCGGTCTCCACGCATCGTCAGGCATTGGCGGCCTTGCTGTTCTTCTACGGCAAGGTGCTGTGCACG |
| | GATCTGCCCTGGCTTCAGGAGATCGGAAGACCTCGGCCGTCGCGGCGCTTGCCGGTGGTGCTGACCCCGGATGAAGTGGTTCGCATCCTCGGTTTTCT |
| | GGAAGGCGAGCATCGTTTGTTCGCCCAGGACTCTAGCTATAGTTCTAGTGGTTGGCTACGTATACTCCGGAATATTAATAGATCATGGAGATAATTAA |
| | AATGATAACCATCTCGCAAATAAATAAGTATTTTACTGTTTTCGTAACAGTTTTGTAATAAAAAAACCTATAAATATTCCGGATTATTCATACCGTCC |
| | CACCATCGGGCGCGGATCTCGGTCCGAAACCATGTCGTACTACCATCACCATCACCATCACGATTACGATATCCCAACGACCGAAAACCTGTATTTTC |
| | AGGGCGCCATGGGATCCGGCCGGCCCCTGCAGGCAGCTGCGCGCTCGCTCGCTCACTGAGGCCGCCCGGGCAAAGCCCGGGCGTCGGGCGACCTTTGG |
| | TCGCCCGGCCTCAGTGAGCGAGCGAGCGCGCAGAGAGGGAGTGGCCAACTCCATCACTAGGGGTTCCTTGTAGTTAATGATTAACCCGCCATGCTACT |
| | TATCTACGTAGCCATGCTCTAGAGCGGCCGCGGCTCCGGTGCCCGTCAGTGGGCAGAGCGCACATCGCCCACAGTCCCCGAGAAGTTGGGGGGAGGGG |
| | TCGGCAATTGAACCGGTGCCTAGAGAAGGTGGCGCGGGGTAAACTGGGAAAGTGATGTCGTGTACTGGCTCCGCCTTTTTCCCGAGGGTGGGGGAGAA |
| | CCGTATATAAGTGCAGTAGTCGCCGTGAACGTTCTTTTTCGCAACGGGTTTGCCGCCAGAACACAGGTAAGTGCCGTGTGTGGTTCCCGCGGGCCTGG |
| | CCTCTTTACGGGTTATGGCCCTTGCGTGCCTTGAATTACTTCCACCTGGCTGCAGTACGTGATTCTTGATCCCGAGCTTCGGGTTGGAAGTGGGTGGG |
| | AGAGTTCGAGGCCTTGCGCTTAAGGAGCCCCTTCGCCTCGTGCTTGAGTTGAGGCCTGGCCTGGGCGCTGGGGCCGCCGCGTGCGAATCTGGTGGCAC |
| | CTTCGCGCCTGTCTCGCTGCTTTCGATAAGTCTCTAGCCATTTAAAATTTTTGATGACCTGCTGCGACGCTTTTTTTCTGGCAAGATAGTCTTGTAAA |
| | TGCGGGCCAAGATCTGCACACTGGTATTTCGGTTTTTGGGGCCGCGGGCGGCGACGGGGCCCGTGCGTCCCAGCGCACATGTTCGGCGAGGCGGGGCC |
| | TGCGAGCGCGGCCACCGAGAATCGGACGGGGGTAGTCTCAAGCTGGCCGGCCTGCTCTGGTGCCTGGTCTCGCGCCGCCGTGTATCGCCCCGCCCTGG |
| | GCGGCAAGGCTGGCCCGGTCGGCACCAGTTGCGTGAGCGGAAAGATGGCCGCTTCCCGGCCCTGCTGCAGGGAGCTCAAAATGGAGGACGCGGCGCTC |
| | GGGAGAGCGGGCGGGTGAGTCACCCACACAAAGGAAAAGGGCCTTTCCGTCCTCAGCCGTCGCTTCATGTGACTCCACGGAGTACCGGGCGCCGTCCA |
| | GGCACCTCGATTAGTTCTCGAGCTTTTGGAGTACGTCGTCTTTAGGTTGGGGGGAGGGGTTTTATGCGATGGAGTTTCCCCACACTGAGTGGGTGGAG |
| | ACTGAAGTTAGGCCAGCTTGGCACTTGATGTAATTCTCCTTGGAATTTGCCCTTTTTGAGTTTGGATCTTGGTTCATTCTCAAGCCTCAGACAGTGGT |
| | TCAAAGTTTTTTTCTTCCATTTCAGGTGTCGTGAGTTTAAACCGCAGCCACCATGCAGATCGAGCTGTCTACCTGCTTCTTCCTGTGCCTGCTGCGGT |
| | TCTGCTTCAGCGCCACCAGAAGATATTACCTGGGCGCCGTGGAACTGAGCTGGGACTACATGCAGTCTGACCTGGGAGAGCTGCCCGTGGACGCTAGA |
| | TTTCCTCCAAGAGTGCCCAAGAGCTTCCCCTTCAACACCTCCGTGGTGTACAAGAAAACCCTGTTCGTGGAATTCACCGACCACCTGTTCAATATCGC |
| | CAAGCCTCGGCCTCCTTGGATGGGACTGCTGGGACCTACAATTCAGGCCGAGGTGTACGACACCGTGGTCATCACCCTGAAGAACATGGCCAGCCATC |
| | CTGTGTCTCTGCACGCCGTGGGAGTGTCTTATTGGAAGGCTTCTGAGGGCGCCGAGTACGACGATCAGACAAGCCAGAGAGAGAAAGAGGACGACAAG |
| | GTTTTCCCTGGCGGCAGCCACACCTATGTCTGGCAGGTCCTGAAAGAAAACGGCCCTATGGCCTCCGATCCTCTGTGCCTGACATACAGCTACCTGAG |
| | CCACGTGGACCTGGTCAAGGACCTGAATTCTGGCCTGATCGGAGCCCTGCTCGTGTGTAGAGAAGGCAGCCTGGCCAAAGAGAAAACCCAGACACTGC |
| | ACAAGTTCATCCTGCTGTTCGCCGTGTTCGACGAGGGCAAGAGCTGGCACAGCGAGACAAAGAACAGCCTGATGCAGGACAGGGATGCCGCCTCTGCT |
| | AGAGCTTGGCCTAAGATGCACACCGTGAACGGCTACGTGAACAGAAGCCTGCCTGGACTGATCGGCTGCCACAGAAAGTCCGTGTACTGGCACGTGAT |
| | CGGCATGGGCACAACACCTGAGGTGCACAGCATCTTTCTGGAAGGCCACACCTTCCTCGTGCGGAACCACAGACAGGCCAGCCTGGAAATCAGCCCTA |
| | TCACCTTCCTGACCGCTCAGACCCTGCTGATGGATCTGGGCCAGTTTCTGCTGTTCTGCCACATCAGCTCCCACCAGCACGATGGCATGGAAGCCTAC |
| | GTGAAGGTGGACAGCTGCCCCGAAGAACCCCAGCTGCGGATGAAGAACAACGAGGAAGCCGAGGACTACGACGACGACCTGACCGACTCTGAGATGGA |
| | CGTCGTCAGATTCGACGACGATAACAGCCCCAGCTTCATCCAGATCAGAAGCGTGGCCAAGAAGCACCCCAAGACCTGGGTGCACTATATCGCCGCCG |
| | AGGAAGAGGACTGGGATTACGCTCCTCTGGTGCTGGCCCCTGACGACAGAAGCTACAAGAGCCAGTACCTGAACAACGGCCCTCAGCGGATCGGCCGG |
| | AAGTATAAGAAAGTGCGGTTCATGGCCTACACCGACGAGACATTCAAGACCAGAGAGGCCATCCAGCACGAGAGCGGAATTCTGGGCCCTCTGCTGTA |
| | TGGCGAAGTGGGCGATACACTGCTGATCATCTTCAAGAACCAGGCCAGCAGACCCTACAACATCTACCCTCACGGCATCACCGATGTGCGGCCCCTGT |
| | ATTCTAGAAGGCTGCCCAAGGGCGTGAAGCACCTGAAGGACTTCCCTATCCTGCCTGGCGAGATTTTCAAGTACAAGTGGACCGTGACCGTGGAAGAT |
| | GGCCCCACCAAGAGCGACCCTAGATGTCTGACACGGTACTACAGCAGCTTCGTGAACATGGAACGCGACCTGGCCAGCGGCCTGATTGGACCTCTGCT |
| | GATCTGCTACAAAGAAAGCGTGGACCAGCGGGGCAACCAGATCATGAGCGACAAGCGGAACGTGATCCTGTTTAGCGTGTTCGATGAGAACCGGTCCT |
| | GGTATCTGACCGAGAACATCCAGCGGTTTCTGCCCAATCCTGCCGGGGTGCAACTGGAAGATCCTGAGTTCCAGGCAAGCAACATCATGCACTCCATC |
| | AATGGCTATGTGTTCGACAGCCTGCAGCTGAGCGTGTGCCTGCACGAAGTGGCCTACTGGTACATCCTGAGCATTGGCGCCCAGACCGACTTCCTGTC |
| | CGTGTTCTTTAGCGGCTACACCTTCAAGCACAAGATGGTGTACGAGGATACCCTGACACTGTTCCCATTCAGCGGCGAGACAGTGTTCATGAGCATGG |
| | AAAACCCCGGCCTGTGGATTCTGGGCTGTCACAACAGCGACTTCCGGAACAGAGGCATGACAGCCCTGCTGAAGGTGTCCAGCTGCGACAAGAACACC |
| | GGCGACTACTACGAGGACAGCTATGAGGACATCAGCGCCTACCTGCTGAGCAAGAACAATGCCATCGAGCCCAGAAGCTTCAGCCAGAATAGCAGACA |
| | CCCCTCCACCAGACAGAAGCAGTTCAACGCCACAACAATCCCCGAGAACGACATCGAGAAAACCGATCCTTGGTTTGCCCACAGAACCCCTATGCCTA |
| | AGATCCAGAACGTGTCCTCCAGCGATCTGCTGATGCTCCTGAGACAGAGCCCTACACCTCACGGACTGAGCCTGTCCGATCTGCAAGAGGCCAAATAC |
| | GAAACCTTCAGCGACGACCCTTCTCCTGGCGCCATCGACAGCAACAATAGCCTGAGCGAGATGACCCACTTCAGACCACAGCTGCACCACAGCGGCGA |
| | CATGGTGTTTACACCTGAGAGCGGCCTCCAGCTGAGACTGAATGAGAAGCTGGGAACCACCGCCGCCACCGAGCTGAAGAAACTGGACTTCAAGGTGT |
| | CCTCTACCAGCAACAACCTGATCAGCACAATCCCCTCCGACAACCTGGCTGCCGGCACCGACAACACATCTTCTCTGGGCCCACCTAGCATGCCCGTG |
| | CACTACGATAGCCAGCTGGATACCACACTGTTCGGCAAGAAGTCTAGCCCTCTGACAGAGTCTGGCGGCCCTCTGTCTCTGAGCGAGGAAAACAACGA |
| | CAGCAAGCTGCTGGAATCCGGCCTGATGAACAGCCAAGAGTCCTCCTGGGGCAAGAATGTGTCCAGCACCGAGTCCGGCAGACTGTTCAAGGGAAAGA |
| | GAGCCCACGGACCTGCTCTGCTGACCAAGGATAACGCCCTGTTCAAAGTGTCCATCAGCCTGCTCAAGACCAACAAGACCTCCAACAACTCCGCCACC |
| | AACAGAAAGACCCACATCGACGGCCCTAGCCTGCTGATCGAGAATAGCCCTAGCGTCTGGCAGAATATCCTGGAAAGCGACACCGAGTTCAAGAAAGT |
| | GACCCCTCTGATCCACGACCGGATGCTCATGGACAAGAACGCCACCGCTCTGCGGCTGAACCACATGAGCAACAAGACAACCAGCAGCAAGAATATGG |
| | AAATGGTGCAGCAGAAGAAAGAGGGCCCCATTCCTCCAGACGCTCAGAACCCCGATATGAGCTTCTTCAAGATGCTCTTTCTGCCCGAGAGCGCCCGG |
| | TGGATTCAGAGAACACACGGCAAGAACTCCCTGAACTCCGGCCAGGGACCTTCTCCAAAGCAGCTGGTTTCCCTGGGACCTGAGAAGTCCGTGGAAGG |
| | ACAGAACTTCCTGAGCGAAAAGAACAAAGTGGTCGTCGGCAAGGGCGAGTTCACCAAGGATGTGGGCCTGAAAGAGATGGTCTTTCCCAGCAGCCGGA |
| | ACCTGTTCCTGACCAACCTGGACAACCTGCACGAGAACAACACCCACAATCAAGAGAAGAAGATCCAAGAGGAAATCGAAAAGAAAGAGACACTCATC |
| | CAAGAGAACGTGGTGCTGCCTCAGATCCACACAGTGACCGGCACCAAGAACTTTATGAAGAATCTGTTCCTGCTGAGTACCCGGCAGAACGTGGAAGG |
| | CAGCTACGATGGCGCTTATGCCCCTGTGCTGCAGGACTTCAGATCCCTGAACGACTCCACCAATCGGACAAAGAAGCACACAGCCCACTTCTCCAAGA |
| | AGGGCGAAGAAGAGAACCTGGAAGGACTGGGCAATCAGACCAAGCAGATCGTCGAGAAGTACGCCTGCACCACCAGAATCAGCCCCAACACAAGCCAG |
| | CAGAACTTCGTGACCCAGCGGAGCAAAAGAGCCCTGAAGCAGTTTCGGCTGCCCCTGGAAGAAACCGAGCTGGAAAAGCGGATCATCGTGGACGACAC |
| | CAGCACACAGTGGTCCAAGAACATGAAGCACTTGACCCCTAGCACACTGACCCAGATCGACTACAACGAGAAAGAGAAGGGCGCTATCACACAGAGCC |
| | CACTGAGCGACTGTCTGACCAGAAGCCACAGCATCCCTCAGGCCAACAGATCCCCTCTGCCAATCGCCAAAGTGTCTAGCTTCCCCAGCATCAGACCC |
| | ATCTACCTGACCAGAGTGCTGTTCCAGGACAACAGCAGCCATCTGCCAGCCGCCAGCTACCGGAAGAAAGATTCTGGCGTGCAAGAGAGCAGCCACTT |
| | TCTGCAGGGCGCTAAGAAGAACAATCTGAGCCTGGCTATTCTGACCCTGGAAATGACCGGCGATCAGAGAGAAGTCGGCTCTCTGGGCACCAGCGCCA |
| | CAAATAGCGTGACCTACAAAAAGGTGGAAAACACCGTGCTGCCTAAGCCTGACCTGCCAAAGACAAGCGGCAAGGTGGAACTGCTGCCAAAGGTGCAC |
| | ATCTACCAGAAGGACCTGTTTCCTACCGAGACAAGCAACGGCTCTCCCGGCCATCTGGATCTGGTGGAAGGATCTCTGCTGCAGGGAACCGAGGGCGC |
| | CATCAAGTGGAACGAGGCCAATAGACCTGGCAAGGTGCCCTTCCTGAGAGTGGCCACAGAGTCCAGCGCCAAGACACCCTCTAAACTGCTGGACCCTC |
| | TGGCCTGGGACAACCACTATGGCACTCAGATCCCCAAAGAGGAATGGAAGTCCCAAGAGAAGTCCCCTGAAAAGACCGCCTTCAAGAAGAAGGACACC |
| | ATTCTGTCCCTGAATGCCTGCGAGAGCAACCACGCCATTGCCGCCATCAATGAGGGCCAGAACAAGCCCGAGATCGAAGTGACCTGGGCCAAGCAGGG |
| | AAGAACCGAGAGACTGTGTAGCCAGAATCCTCCTGTGCTGAAGCGGCACCAGAGAGAAATCACCCGGACCACACTGCAGAGCGACCAAGAAGAGATCG |
| | ATTACGACGATACCATCAGCGTCGAGATGAAGAAAGAAGATTTCGACATCTACGACGAGGACGAGAATCAGAGCCCTCGGAGCTTCCAGAAGAAAACC |
| | AGGCACTACTTTATTGCCGCCGTCGAGCGGCTGTGGGACTACGGAATGTCTAGCTCTCCTCACGTGCTGCGGAATAGAGCCCAGTCTGGTAGCGTGCC |
| | CCAGTTCAAAAAGGTCGTGTTCCAAGAGTTCACCGACGGCAGCTTCACCCAGCCACTGTATAGAGGCGAGCTGAACGAGCATCTGGGCCTGCTGGGCC |
| | CTTATATCAGAGCCGAAGTGGAAGATAACATCATGGTCACCTTCCGGAATCAGGCTAGCCGGCCTTACAGCTTCTACAGCTCCCTGATCTCCTACGAA |
| | GAGGACCAGAGACAGGGCGCAGAGCCCCGGAAGAATTTCGTGAAGCCCAACGAGACTAAGACCTACTTTTGGAAGGTGCAGCACCATATGGCCCCTAC |
| | AAAGGACGAGTTCGACTGCAAAGCCTGGGCCTACTTCTCCGATGTGGACCTCGAAAAGGACGTGCACAGCGGACTCATCGGCCCACTGCTTGTGTGCC |
| | ACACCAACACACTGAACCCCGCTCACGGCAGACAAGTGACAGTGCAAGAGTTCGCCCTGTTTTTCACCATCTTCGACGAAACGAAGTCCTGGTACTTC |
| | ACCGAAAACATGGAAAGAAACTGCAGGGCCCCTTGCAACATTCAGATGGAAGATCCCACCTTCAAAGAGAACTACCGGTTCCACGCCATCAACGGCTA |
| | CATCATGGACACACTGCCCGGCCTGGTTATGGCCCAGGATCAGAGAATCCGGTGGTATCTGCTGTCCATGGGCTCCAACGAGAATATCCACTCCATCC |
| | ACTTCAGCGGCCACGTGTTCACCGTGCGGAAAAAAGAAGAGTACAAAATGGCCCTGTACAATCTGTACCCTGGGGTGTTCGAAACCGTTGAGATGCTG |
| | CCTAGCAAGGCCGGAATTTGGAGAGTGGAATGTCTGATTGGAGAGCACCTCCACGCCGGGATGAGCACCCTGTTTCTGGTGTACTCCAACAAGTGTCA |
| | GACCCCTCTCGGCATGGCCTCTGGCCACATTAGAGACTTCCAGATCACCGCCAGCGGACAGTATGGACAGTGGGCCCCTAAACTGGCCAGACTGCACT |
| | ACTCCGGCAGCATCAATGCCTGGTCCACCAAAGAGCCTTTCAGCTGGATCAAAGTGGACCTGCTGGCTCCCATGATCATCCACGGAATCAAGACCCAG |
| | GGCGCCAGACAAAAGTTCAGCAGCCTGTACATCAGCCAGTTCATCATCATGTACAGCCTGGACGGAAAGAAGTGGCAGACCTACCGGGGCAATAGCAC |
| | CGGCACACTGATGGTGTTCTTCGGCAACGTGGACTCCAGCGGCATTAAGCACAACATCTTCAACCCTCCAATCATTGCCCGGTACATCCGGCTGCACC |
| | CCACACACTACAGCATCAGGTCTACCCTGAGAATGGAACTGATGGGCTGCGACCTGAACAGCTGCTCTATGCCCCTCGGAATGGAAAGCAAGGCCATC |
| | AGCGACGCCCAGATCACAGCCTCTAGCTACTTCACCAACATGTTCGCCACTTGGAGCCCCTCTAAGGCCCGGCTTCATCTGCAAGGCAGAAGCAACGC |
| | TTGGAGGCCCCAAGTGAACAACCCCAAAGAATGGCTCCAGGTGGACTTTCAGAAAACCATGAAAGTGACAGGCGTGACCACACAGGGCGTCAAGTCCC |
| | TGCTGACCTCTATGTACGTGAAAGAGTTTCTGATCAGCTCCAGCCAGGACGGCCACCAGTGGACCCTGTTCTTCCAGAACGGCAAAGTGAAAGTGTTC |
| | CAGGGAAATCAGGACAGCTTCACACCCGTGGTCAATAGTCTGGACCCACCACTGCTGACCCGCTACCTGCGAATTCACCCTCAGTCTTGGGTGCACCA |
| | GATTGCCCTGCGGATGGAAGTGCTGGGCTGTGAAGCTCAGGACCTCTACTAGTTAATTAAGAGCATCTTACCGCCATTTATTCCCATATTTGTTCTGT |
| | TTTTCTTGATTTGGGTATACATTTAAATGTTAATAAAACAAAATGGTGGGGCAATCATTTACATTTTTAGGGATATGTAATTACTAGTTCAGGTGTAT |
| | TGCCACAAGACAAACATGTTAAGAAACTTTCCCGTTATTTACGCTCTGTTCCTGTTAATCAACCTCTGGATTACAAAATTTGTGAAAGATTGACTGAT |
| | ATTCTTAACTATGTTGCTCCTTTTACGCTGTGTGGATATGCTGCTTTATAGCCTCTGTATCTAGCTATTGCTTCCCGTACGGCTTTCGTTTTCTCCTC |
| | CTTGTATAAATCCTGGTTGCTGTCTCTTTTAGAGGAGTTGTGGCCCGTTGTCCGTCAACGTGGCGTGGTGTGCTCTGTGTTTGCTGACGCAACCCCCA |
| | CTGGCTGGGGCATTGCCACCACCTGTCAACTCCTTTCTGGGACTTTCGCTTTCCCCCTCCCGATCGCCACGGCAGAACTCATCGCCGCCTGCCTTGCC |
| | CGCTGCTGGACAGGGGCTAGGTTGCTGGGCACTGATAATTCCGTGGTGTTGTCTGTGCCTTCTAGTTGCCAGCCATCTGTTGTTTGCCCCTCCCCCGT |
| | GCCTTCCTTGACCCTGGAAGGTGCCACTCCCACTGTCCTTTCCTAATAAAATGAGGAAATTGCATCGCATTGTCTGAGTAGGTGTCATTCTATTCTGG |
| | GGGGTGGGGTGGGGCAGGACAGCAAGGGGGAGGATTGGGAAGACAATAGCAGGCATGCTGGGGATGCGGTGGGCTCTATGGCTCTAGAGCATGGCTAC |
| | GTAGATAAGTAGCATGGCGGGTTAATCATTAACTACACCTGCAGGAGGAACCCCTAGTGATGGAGTTGGCCACTCCCTCTCTGCGCGCTCGCTCGCTC |
| | ACTGAGGCCGGGCGACCAAAGGTCGCCCGACGCCCGGGCGGCCTCAGTGAGCGAGCGAGCGCGCAGCTGCCTGCAGGGGCGCGCCTCGAGGCATGCGG |
| | TACCAAGCTTGTCGAGAAGTACTAGAGGATCATAATCAGCCATACCACATTTGTAGAGGTTTTACTTGCTTTAAAAAACCTCCCACACCTCCCCCTGA |
| | ACCTGAAACATAAAATGAATGCAATTGTTGTTGTTAACTTGTTTATTGCAGCTTATAATGGTTACAAATAAAGCAATAGCATCACAAATTTCACAAAT |
| | AAAGCATTTTTTTCACTGCATTCTAGTTGTGGTTTGTCCAAACTCATCAATGTATCTTATCATGTCTGGATCTGATCACTGATATCGCCTAGGAGATC |
| | CGAACCAGATAAGTGAAATCTAGTTCCAAACTATTTTGTCATTTTTAATTTTCGTATTAGCTTACGACGCTACACCCAGTTCCCATCTATTTTGTCAC |
| | TCTTCCCTAAATAATCCTTAAAAACTCCATTTCCACCCCTCCCAGTTCCCAACTATTTTGTCCGCCCACAGCGGGGCATTTTTCTTCCTGTTATGTTT |
| | TTAATCAAACATCCTGCCAACTCCATGTGACAAACCGTCATCTTCGGCTACTTTTTCTCTGTCACAGAATGAAAATTTTTCTGTCATCTCTTCGTTAT |
| | TAATGTTTGTAATTGACTGAATATCAACGCTTATTTGCAGCCTGAATGGCGAATGG |
| ceDNAFVIII- | GACGCGCCCTGTAGCGGCGCATTAAGCGCGGCGGGTGTGGTGGTTACGCGCAGCGTGACCGCTACACTTGCCAGCGCCCTAGCGCCCGCTCCTTTCGC |
| vector 6 | TTTCTTCCCTTCCTTTCTCGCCACGTTCGCCGGCTTTCCCCGTCAAGCTCTAAATCGGGGGCTCCCTTTAGGGTTCCGATTTAGTGCTTTACGGCACC |
| (SEQ ID NO: | TCGACCCCAAAAAACTTGATTAGGGTGATGGTTCACGTAGTGGGCCATCGCCCTGATAGACGGTTTTTCGCCCTTTGACGTTGGAGTCCACGTTCTTT |
| 197) | AATAGTGGACTCTTGTTCCAAACTGGAACAACACTCAACCCTATCTCGGTCTATTCTTTTGATTTATAAGGGATTTTGCCGATTTCGGCCTATTGGTT |
| | AAAAAATGAGCTGATTTAACAAAAATTTAACGCGAATTTTAACAAAATATTAACGTTTACAATTTCAGGTGGCACTTTTCGGGGAAATGTGCGCGGAA |
| | CCCCTATTTGTTTATTTTTCTAAATACATTCAAATATGTATCCGCTCATGAGACAATAACCCTGATAAATGCTTCAATAATATTGAAAAAGGAAGAGT |
| | ATGAGTATTCAACATTTCCGTGTCGCCCTTATTCCCTTTTTTGCGGCATTTTGCCTTCCTGTTTTTGCTCACCCAGAAACGCTGGTGAAAGTAAAAGA |
| | TGCTGAAGATCAGTTGGGTGCACGAGTGGGTTACATCGAACTGGATCTCAACAGCGGTAAGATCCTTGAGAGTTTTCGCCCCGAAGAACGTTTTCCAA |
| | TGATGAGCACTTTTAAAGTTCTGCTATGTGGCGCGGTATTATCCCGTATTGACGCCGGGCAAGAGCAACTCGGTCGCCGCATACACTATTCTCAGAAT |
| | GACTTGGTTGAGTACTCACCAGTCACAGAAAAGCATCTTACGGATGGCATGACAGTAAGAGAATTATGCAGTGCTGCCATAACCATGAGTGATAACAC |
| | TGCGGCCAACTTACTTCTGACAACGATCGGAGGACCGAAGGAGCTAACCGCTTTTTTGCACAACATGGGGGATCATGTAACTCGCCTTGATCGTTGGG |
| | AACCGGAGCTGAATGAAGCCATACCAAACGACGAGCGTGACACCACGATGCCTGTAGCAATGGCAACAACGTTGCGCAAACTATTAACTGGCGAACTA |
| | CTTACTCTAGCTTCCCGGCAACAATTAATAGACTGGATGGAGGCGGATAAAGTTGCAGGACCACTTCTGCGCTCGGCCCTTCCGGCTGGCTGGTTTAT |
| | TGCTGATAAATCTGGAGCCGGTGAGCGTGGGTCTCGCGGTATCATTGCAGCACTGGGGCCAGATGGTAAGCCCTCCCGTATCGTAGTTATCTACACGA |
| | CGGGGAGTCAGGCAACTATGGATGAACGAAATAGACAGATCGCTGAGATAGGTGCCTCACTGATTAAGCATTGGTAACTGTCAGACCAAGTTTACTCA |
| | TATATACTTTAGATTGATTTAAAACTTCATTTTTAATTTAAAAGGATCTAGGTGAAGATCCTTTTTGATAATCTCATGACCAAAATCCCTTAACGTGA |
| | GTTTTCGTTCCACTGAGCGTCAGACCCCGTAGAAAAGATCAAAGGATCTTCTTGAGATCCTTTTTTTCTGCGCGTAATCTGCTGCTTGCAAACAAAAA |
| | AACCACCGCTACCAGCGGTGGTTTGTTTGCCGGATCAAGAGCTACCAACTCTTTTTCCGAAGGTAACTGGCTTCAGCAGAGCGCAGATACCAAATACT |
| | GTCCTTCTAGTGTAGCCGTAGTTAGGCCACCACTTCAAGAACTCTGTAGCACCGCCTACATACCTCGCTCTGCTAATCCTGTTACCAGTGGCTGCTGC |
| | CAGTGGCGATAAGTCGTGTCTTACCGGGTTGGACTCAAGACGATAGTTACCGGATAAGGCGCAGCGGTCGGGCTGAACGGGGGGTTCGTGCACACAGC |
| | CCAGCTTGGAGCGAACGACCTACACCGAACTGAGATACCTACAGCGTGAGCATTGAGAAAGCGCCACGCTTCCCGAAGGGAGAAAGGCGGACAGGTAT |
| | CCGGTAAGCGGCAGGGTCGGAACAGGAGAGCGCACGAGGGAGCTTCCAGGGGGAAACGCCTGGTATCTTTATAGTCCTGTCGGGTTTCGCCACCTCTG |
| | ACTTGAGCGTCGATTTTTGTGATGCTCGTCAGGGGGGCGGAGCCTATGGAAAAACGCCAGCAACGCGGCCTTTTTACGGTTCCTGGCCTTTTGCTGGC |
| | CTTTTGCTCACATGTTCTTTCCTGCGTTATCCCCTGATTCTGTGGATAACCGTATTACCGCCTTTGAGTGAGCTGATACCGCTCGCCGCAGCCGAACG |
| | ACCGAGCGCAGCGAGTCAGTGAGCGAGGAAGCGGAAGAGCGCCTGATGCGGTATTTTCTCCTTACGCATCTGTGCGGTATTTCACACCGCAGACCAGC |
| | CGCGTAACCTGGCAAAATCGGTTACGGTTGAGTAATAAATGGATGCCCTGCGTAAGCGGGTGTGGGCGGACAATAAAGTCTTAAACTGAACAAAATAG |
| | ATCTAAACTATGACAATAAAGTCTTAAACTAGACAGAATAGTTGTAAACTGAAATCAGTCCAGTTATGCTGTGAAAAAGCATACTGGACTTTTGTTAT |
| | GGCTAAAGCAAACTCTTCATTTTCTGAAGTGCAAATTGCCCGTCGTATTAAAGAGGGGCGTGGCCAAGGGCATGGTAAAGACTATATTCGCGGCGTTG |
| | TGACAATTTACCGAACAACTCCGCGGCCGGGAAGCCGATCTCGGCTTGAACGAATTGTTAGGTGGCGGTACTTGGGTCGATATCAAAGTGCATCACTT |
| | CTTCCCGTATGCCCAACTTTGTATAGAGAGCCACTGCGGGATCGTCACCGTAATCTGCTTGCACGTAGATCACATAAGCACCAAGCGCGTTGGCCTCA |
| | TGCTTGAGGAGATTGATGAGCGCGGTGGCAATGCCCTGCCTCCGGTGCTCGCCGGAGACTGCGAGATCATAGATATAGATCTCACTACGCGGCTGCTC |
| | AAACCTGGGCAGAACGTAAGCCGCGAGAGCGCCAACAACCGCTTCTTGGTCGAAGGCAGCAAGCGCGATGAATGTCTTACTACGGAGCAAGTTCCCGA |
| | GGTAATCGGAGTCCGGCTGATGTTGGGAGTAGGTGGCTACGTCTCCGAACTCACGACCGAAAAGATCAAGAGCAGCCCGCATGGATTTGACTTGGTCA |
| | GGGCCGAGCCTACATGTGCGAATGATGCCCATACTTGAGCCACCTAACTTTGTTTTAGGGCGACTGCCCTGCTGCGTAACATCGTTGCTGCTGCGTAA |
| | CATCGTTGCTGCTCCATAACATCAAACATCGACCCACGGCGTAACGCGCTTGCTGCTTGGATGCCCGAGGCATAGACTGTACAAAAAAACAGTCATAA |
| | CAAGCCATGAAAACCGCCACTGCGCCGTTACCACCGCTGCGTTCGGTCAAGGTTCTGGACCAGTTGCGTGAGCGCATACGCTACTTGCATTACAGTTT |
| | ACGAACCGAACAGGCTTATGTCAACTGGGTTCGTGCCTTCATCCGTTTCCACGGTGTGCGTCACCCGGCAACCTTGGGCAGCAGCGAAGTCGAGGCAT |
| | TTCTGTCCTGGCTGGCGAACGAGCGCAAGGTTTCGGTCTCCACGCATCGTCAGGCATTGGCGGCCTTGCTGTTCTTCTACGGCAAGGTGCTGTGCACG |
| | GATCTGCCCTGGCTTCAGGAGATCGGAAGACCTCGGCCGTCGCGGCGCTTGCCGGTGGTGCTGACCCCGGATGAAGTGGTTCGCATCCTCGGTTTTCT |
| | GGAAGGCGAGCATCGTTTGTTCGCCCAGGACTCTAGCTATAGTTCTAGTGGTTGGCTACGTATACTCCGGAATATTAATAGATCATGGAGATAATTAA |
| | AATGATAACCATCTCGCAAATAAATAAGTATTTTACTGTTTTCGTAACAGTTTTGTAATAAAAAAACCTATAAATATTCCGGATTATTCATACCGTCC |
| | CACCATCGGGCGCGGATCTCGGTCCGAAACCATGTCGTACTACCATCACCATCACCATCACGATTACGATATCCCAACGACCGAAAACCTGTATTTTC |
| | AGGGCGCCATGGGATCCGGCCGGCCCCTGCAGGCAGCTGCGCGCTCGCTCGCTCACTGAGGCCGCCCGGGCAAAGCCCGGGCGTCGGGCGACCTTTGG |
| | TCGCCCGGCCTCAGTGAGCGAGCGAGCGCGCAGAGAGGGAGTGGCCAACTCCATCACTAGGGGTTCCTTGTAGTTAATGATTAACCCGCCATGCTACT |
| | TATCTACGTAGCCATGCTCTAGAGCGGCCGCGGCTCCGGTGCCCGTCAGTGGGCAGAGCGCACATCGCCCACAGTCCCCGAGAAGTTGGGGGGAGGGG |
| | TCGGCAATTGAACCGGTGCCTAGAGAAGGTGGCGCGGGGTAAACTGGGAAAGTGATGTCGTGTACTGGCTCCGCCTTTTTCCCGAGGGTGGGGGAGAA |
| | CCGTATATAAGTGCAGTAGTCGCCGTGAACGTTCTTTTTCGCAACGGGTTTGCCGCCAGAACACAGGTAAGTGCCGTGTGTGGTTCCCGCGGGCCTGG |
| | CCTCTTTACGGGTTATGGCCCTTGCGTGCCTTGAATTACTTCCACCTGGCTGCAGTACGTGATTCTTGATCCCGAGCTTCGGGTTGGAAGTGGGTGGG |
| | AGAGTTCGAGGCCTTGCGCTTAAGGAGCCCCTTCGCCTCGTGCTTGAGTTGAGGCCTGGCCTGGGCGCTGGGGCCGCCGCGTGCGAATCTGGTGGCAC |
| | CTTCGCGCCTGTCTCGCTGCTTTCGATAAGTCTCTAGCCATTTAAAATTTTTGATGACCTGCTGCGACGCTTTTTTTCTGGCAAGATAGTCTTGTAAA |
| | TGCGGGCCAAGATCTGCACACTGGTATTTCGGTTTTTGGGGCCGCGGGCGGCGACGGGGCCCGTGCGTCCCAGCGCACATGTTCGGCGAGGCGGGGCC |
| | TGCGAGCGCGGCCACCGAGAATCGGACGGGGGTAGTCTCAAGCTGGCCGGCCTGCTCTGGTGCCTGGTCTCGCGCCGCCGTGTATCGCCCCGCCCTGG |
| | GCGGCAAGGCTGGCCCGGTCGGCACCAGTTGCGTGAGCGGAAAGATGGCCGCTTCCCGGCCCTGCTGCAGGGAGCTCAAAATGGAGGACGCGGCGCTC |
| | GGGAGAGCGGGCGGGTGAGTCACCCACACAAAGGAAAAGGGCCTTTCCGTCCTCAGCCGTCGCTTCATGTGACTCCACGGAGTACCGGGCGCCGTCCA |
| | GGCACCTCGATTAGTTCTCGAGCTTTTGGAGTACGTCGTCTTTAGGTTGGGGGGAGGGGTTTTATGCGATGGAGTTTCCCCACACTGAGTGGGTGGAG |
| | ACTGAAGTTAGGCCAGCTTGGCACTTGATGTAATTCTCCTTGGAATTTGCCCTTTTTGAGTTTGGATCTTGGTTCATTCTCAAGCCTCAGACAGTGGT |
| | TCAAAGTTTTTTTCTTCCATTTCAGGTGTCGTGAGTTTAAACCGCAGCCACCATGCAGATCGAGCTGTCTACCTGCTTCTTCCTGTGCCTGCTGCGGT |
| | TCTGCTTCAGCGCCACCAGAAGATATTACCTGGGCGCCGTGGAACTGAGCTGGGACTACATGCAGTCTGACCTGGGAGAGCTGCCCGTGGACGCTAGA |
| | TTTCCTCCAAGAGTGCCCAAGAGCTTCCCCTTCAACACCTCCGTGGTGTACAAGAAAACCCTGTTCGTGGAATTCACCGACCACCTGTTCAATATCGC |
| | CAAGCCTCGGCCTCCTTGGATGGGACTGCTGGGACCTACAATTCAGGCCGAGGTGTACGACACCGTGGTCATCACCCTGAAGAACATGGCCAGCCATC |
| | CTGTGTCTCTGCACGCCGTGGGAGTGTCTTATTGGAAGGCTTCTGAGGGCGCCGAGTACGACGATCAGACAAGCCAGAGAGAGAAAGAGGACGACAAG |
| | GTTTTCCCTGGCGGCAGCCACACCTATGTCTGGCAGGTCCTGAAAGAAAACGGCCCTATGGCCTCCGATCCTCTGTGCCTGACATACAGCTACCTGAG |
| | CCACGTGGACCTGGTCAAGGACCTGAATTCTGGCCTGATCGGAGCCCTGCTCGTGTGTAGAGAAGGCAGCCTGGCCAAAGAGAAAACCCAGACACTGC |
| | ACAAGTTCATCCTGCTGTTCGCCGTGTTCGACGAGGGCAAGAGCTGGCACAGCGAGACAAAGAACAGCCTGATGCAGGACAGGGATGCCGCCTCTGCT |
| | AGAGCTTGGCCTAAGATGCACACCGTGAACGGCTACGTGAACAGAAGCCTGCCTGGACTGATCGGCTGCCACAGAAAGTCCGTGTACTGGCACGTGAT |
| | CGGCATGGGCACAACACCTGAGGTGCACAGCATCTTTCTGGAAGGCCACACCTTCCTCGTGCGGAACCACAGACAGGCCAGCCTGGAAATCAGCCCTA |
| | TCACCTTCCTGACCGCTCAGACCCTGCTGATGGATCTGGGCCAGTTTCTGCTGTTCTGCCACATCAGCTCCCACCAGCACGATGGCATGGAAGCCTAC |
| | GTGAAGGTGGACAGCTGCCCCGAAGAACCCCAGCTGCGGATGAAGAACAACGAGGAAGCCGAGGACTACGACGACGACCTGACCGACTCTGAGATGGA |
| | CGTCGTCAGATTCGACGACGATAACAGCCCCAGCTTCATCCAGATCAGAAGCGTGGCCAAGAAGCACCCCAAGACCTGGGTGCACTATATCGCCGCCG |
| | AGGAAGAGGACTGGGATTACGCTCCTCTGGTGCTGGCCCCTGACGACAGAAGCTACAAGAGCCAGTACCTGAACAACGGCCCTCAGCGGATCGGCCGG |
| | AAGTATAAGAAAGTGCGGTTCATGGCCTACACCGACGAGACATTCAAGACCAGAGAGGCCATCCAGCACGAGAGCGGAATTCTGGGCCCTCTGCTGTA |
| | TGGCGAAGTGGGCGATACACTGCTGATCATCTTCAAGAACCAGGCCAGCAGACCCTACAACATCTACCCTCACGGCATCACCGATGTGCGGCCCCTGT |
| | ATTCTAGAAGGCTGCCCAAGGGCGTGAAGCACCTGAAGGACTTCCCTATCCTGCCTGGCGAGATTTTCAAGTACAAGTGGACCGTGACCGTGGAAGAT |
| | GGCCCCACCAAGAGCGACCCTAGATGTCTGACACGGTACTACAGCAGCTTCGTGAACATGGAACGCGACCTGGCCAGCGGCCTGATTGGACCTCTGCT |
| | GATCTGCTACAAAGAAAGCGTGGACCAGCGGGGCAACCAGATCATGAGCGACAAGCGGAACGTGATCCTGTTTAGCGTGTTCGATGAGAACCGGTCCT |
| | GGTATCTGACCGAGAACATCCAGCGGTTTCTGCCCAATCCTGCCGGGGTGCAACTGGAAGATCCTGAGTTCCAGGCAAGCAACATCATGCACTCCATC |
| | AATGGCTATGTGTTCGACAGCCTGCAGCTGAGCGTGTGCCTGCACGAAGTGGCCTACTGGTACATCCTGAGCATTGGCGCCCAGACCGACTTCCTGTC |
| | CGTGTTCTTTAGCGGCTACACCTTCAAGCACAAGATGGTGTACGAGGATACCCTGACACTGTTCCCATTCAGCGGCGAGACAGTGTTCATGAGCATGG |
| | AAAACCCCGGCCTGTGGATTCTGGGCTGTCACAACAGCGACTTCCGGAACAGAGGCATGACAGCCCTGCTGAAGGTGTCCAGCTGCGACAAGAACACC |
| | GGCGACTACTACGAGGACAGCTATGAGGACATCAGCGCCTACCTGCTGAGCAAGAACAATGCCATCGAGCCTCGGAGCTTCAGCCAGAATCCTCCTGT |
| | GCTGAAGCGGCACCAGCGCGAGATCACCAGAACAACCCTGCAGAGCGACCAAGAGGAAATCGATTACGACGACACCATCAGCGTCGAGATGAAGAAAG |
| | AAGATTTCGACATCTACGACGAGGACGAGAATCAGAGCCCCAGAAGCTTTCAGAAAAAGACCCGGCACTACTTCATTGCCGCCGTCGAGAGACTGTGG |
| | GACTACGGCATGTCTAGCAGCCCTCACGTGCTGAGAAATAGAGCCCAGAGCGGCAGCGTGCCCCAGTTCAAGAAAGTGGTGTTCCAAGAGTTCACCGA |
| | CGGCAGCTTCACCCAGCCACTGTATAGAGGCGAGCTGAACGAGCATCTGGGCCTGCTGGGCCCTTATATCAGAGCCGAAGTGGAAGATAACATCATGG |
| | TCACCTTCCGGAATCAGGCTAGCCGGCCTTACAGCTTCTACAGCTCCCTGATCAGCTACGAAGAGGACCAGAGACAGGGCGCTGAGCCCAGAAAGAAC |
| | TTCGTGAAGCCCAACGAGACTAAGACCTACTTTTGGAAGGTGCAGCACCACATGGCCCCTACAAAGGACGAGTTCGACTGCAAAGCCTGGGCCTACTT |
| | CTCCGATGTGGATCTGGAAAAGGACGTGCACAGCGGGCTCATCGGACCACTGCTTGTGTGCCACACCAACACACTGAACCCCGCTCACGGCAGACAAG |
| | TGACAGTGCAAGAGTTCGCCCTGTTCTTCACCATCTTCGACGAAACAAAGAGCTGGTACTTCACCGAGAATATGGAACGGAACTGCAGAGCCCCTTGC |
| | AACATCCAGATGGAAGATCCCACCTTCAAAGAGAACTACCGGTTCCACGCCATCAACGGCTACATCATGGACACACTGCCCGGCCTGGTTATGGCCCA |
| | GGATCAGAGAATCCGGTGGTATCTGCTGTCCATGGGCTCCAACGAGAATATCCACAGCATCCACTTCAGCGGCCACGTGTTCACCGTGCGGAAAAAAG |
| | AAGAGTACAAAATGGCCCTGTACAATCTGTACCCTGGGGTGTTCGAAACCGTGGAAATGCTGCCTTCCAAGGCCGGCATTTGGAGAGTGGAATGTCTG |
| | ATTGGAGAGCACCTCCACGCCGGAATGAGCACCCTGTTTCTGGTGTACAGCAACAAGTGTCAGACCCCTCTCGGCATGGCCTCTGGACACATCAGAGA |
| | CTTCCAGATCACCGCCTCTGGCCAGTACGGACAGTGGGCTCCTAAACTGGCTCGGCTGCACTACAGCGGCAGCATCAATGCCTGGTCCACCAAAGAGC |
| | CCTTCAGCTGGATCAAGGTGGACCTGCTGGCTCCCATGATCATCCACGGAATCAAGACCCAGGGCGCCAGACAGAAGTTCAGCAGCCTGTACATCAGC |
| | CAGTTCATCATCATGTACAGCCTGGACGGCAAGAAGTGGCAGACCTACAGAGGCAACAGCACCGGCACACTCATGGTGTTCTTCGGCAACGTGGACTC |
| | CAGCGGCATTAAGCACAACATCTTCAACCCTCCAATCATTGCCCGGTACATCCGGCTGCACCCCACACACTACAGCATCCGGTCTACCCTGAGAATGG |
| | AACTGATGGGCTGCGACCTGAACAGCTGCTCTATGCCCCTCGGAATGGAAAGCAAGGCCATCAGCGACGCCCAGATCACAGCCAGCAGCTACTTCACC |
| | AACATGTTCGCCACTTGGAGCCCCTCCAAGGCTAGACTGCATCTGCAGGGCAGAAGCAACGCTTGGAGGCCCCAAGTGAACAACCCCAAAGAGTGGCT |
| | GCAGGTTGACTTTCAAAAGACCATGAAAGTGACCGGCGTGACCACACAGGGCGTCAAGTCTCTGCTGACCTCTATGTACGTGAAAGAGTTCCTGATCT |
| | CCAGCAGCCAGGACGGCCATCAGTGGACCCTGTTTTTCCAGAACGGCAAAGTGAAAGTGTTCCAGGGCAATCAGGACAGCTTCACACCCGTGGTCAAT |
| | TCTCTGGACCCTCCACTGCTGACCAGATACCTGCGGATTCACCCTCAGTCTTGGGTGCACCAGATCGCTCTGCGGATGGAAGTGCTGGGCTGTGAAGC |
| | TCAGGACCTCTACTAGTTAATTAAGAGCATCTTACCGCCATTTATTCCCATATTTGTTCTGTTTTTCTTGATTTGGGTATACATTTAAATGTTAATAA |
| | AACAAAATGGTGGGGCAATCATTTACATTTTTAGGGATATGTAATTACTAGTTCAGGTGTATTGCCACAAGACAAACATGTTAAGAAACTTTCCCGTT |
| | ATTTACGCTCTGTTCCTGTTAATCAACCTCTGGATTACAAAATTTGTGAAAGATTGACTGATATTCTTAACTATGTTGCTCCTTTTACGCTGTGTGGA |
| | TATGCTGCTTTATAGCCTCTGTATCTAGCTATTGCTTCCCGTACGGCTTTCGTTTTCTCCTCCTTGTATAAATCCTGGTTGCTGTCTCTTTTAGAGGA |
| | GTTGTGGCCCGTTGTCCGTCAACGTGGCGTGGTGTGCTCTGTGTTTGCTGACGCAACCCCCACTGGCTGGGGCATTGCCACCACCTGTCAACTCCTTT |
| | CTGGGACTTTCGCTTTCCCCCTCCCGATCGCCACGGCAGAACTCATCGCCGCCTGCCTTGCCCGCTGCTGGACAGGGGCTAGGTTGCTGGGCACTGAT |
| | AATTCCGTGGTGTTGTCTGTGCCTTCTAGTTGCCAGCCATCTGTTGTTTGCCCCTCCCCCGTGCCTTCCTTGACCCTGGAAGGTGCCACTCCCACTGT |
| | CCTTTCCTAATAAAATGAGGAAATTGCATCGCATTGTCTGAGTAGGTGTCATTCTATTCTGGGGGGTGGGGTGGGGCAGGACAGCAAGGGGGAGGATT |
| | GGGAAGACAATAGCAGGCATGCTGGGGATGCGGTGGGCTCTATGGCTCTAGAGCATGGCTACGTAGATAAGTAGCATGGCGGGTTAATCATTAACTAC |
| | ACCTGCAGGAGGAACCCCTAGTGATGGAGTTGGCCACTCCCTCTCTGCGCGCTCGCTCGCTCACTGAGGCCGGGCGACCAAAGGTCGCCCGACGCCCG |
| | GGCGGCCTCAGTGAGCGAGCGAGCGCGCAGCTGCCTGCAGGGGCGCGCCTCGAGGCATGCGGTACCAAGCTTGTCGAGAAGTACTAGAGGATCATAAT |
| | CAGCCATACCACATTTGTAGAGGTTTTACTTGCTTTAAAAAACCTCCCACACCTCCCCCTGAACCTGAAACATAAAATGAATGCAATTGTTGTTGTTA |
| | ACTTGTTTATTGCAGCTTATAATGGTTACAAATAAAGCAATAGCATCACAAATTTCACAAATAAAGCATTTTTTTCACTGCATTCTAGTTGTGGTTTG |
| | TCCAAACTCATCAATGTATCTTATCATGTCTGGATCTGATCACTGATATCGCCTAGGAGATCCGAACCAGATAAGTGAAATCTAGTTCCAAACTATTT |
| | TGTCATTTTTAATTTTCGTATTAGCTTACGACGCTACACCCAGTTCCCATCTATTTTGTCACTCTTCCCTAAATAATCCTTAAAAACTCCATTTCCAC |
| | CCCTCCCAGTTCCCAACTATTTTGTCCGCCCACAGCGGGGCATTTTTCTTCCTGTTATGTTTTTAATCAAACATCCTGCCAACTCCATGTGACAAACC |
| | GTCATCTTCGGCTACTTTTTCTCTGTCACAGAATGAAAATTTTTCTGTCATCTCTTCGTTATTAATGTTTGTAATTGACTGAATATCAACGCTTATTT |
| | GCAGCCTGAATGGCGAATGG |
| ceDNAFVIII- | GACGCGCCCTGTAGCGGCGCATTAAGCGCGGCGGGTGTGGTGGTTACGCGCAGCGTGACCGCTACACTTGCCAGCGCCCTAGCGCCCGCTCCTTTCGC |
| vector 7 | TTTCTTCCCTTCCTTTCTCGCCACGTTCGCCGGCTTTCCCCGTCAAGCTCTAAATCGGGGGCTCCCTTTAGGGTTCCGATTTAGTGCTTTACGGCACC |
| (SEQ ID NO: | TCGACCCCAAAAAACTTGATTAGGGTGATGGTTCACGTAGTGGGCCATCGCCCTGATAGACGGTTTTTCGCCCTTTGACGTTGGAGTCCACGTTCTTT |
| 198) | AATAGTGGACTCTTGTTCCAAACTGGAACAACACTCAACCCTATCTCGGTCTATTCTTTTGATTTATAAGGGATTTTGCCGATTTCGGCCTATTGGTT |
| | AAAAAATGAGCTGATTTAACAAAAATTTAACGCGAATTTTAACAAAATATTAACGTTTACAATTTCAGGTGGCACTTTTCGGGGAAATGTGCGCGGAA |
| | CCCCTATTTGTTTATTTTTCTAAATACATTCAAATATGTATCCGCTCATGAGACAATAACCCTGATAAATGCTTCAATAATATTGAAAAAGGAAGAGT |
| | ATGAGTATTCAACATTTCCGTGTCGCCCTTATTCCCTTTTTTGCGGCATTTTGCCTTCCTGTTTTTGCTCACCCAGAAACGCTGGTGAAAGTAAAAGA |
| | TGCTGAAGATCAGTTGGGTGCACGAGTGGGTTACATCGAACTGGATCTCAACAGCGGTAAGATCCTTGAGAGTTTTCGCCCCGAAGAACGTTTTCCAA |
| | TGATGAGCACTTTTAAAGTTCTGCTATGTGGCGCGGTATTATCCCGTATTGACGCCGGGCAAGAGCAACTCGGTCGCCGCATACACTATTCTCAGAAT |
| | GACTTGGTTGAGTACTCACCAGTCACAGAAAAGCATCTTACGGATGGCATGACAGTAAGAGAATTATGCAGTGCTGCCATAACCATGAGTGATAACAC |
| | TGCGGCCAACTTACTTCTGACAACGATCGGAGGACCGAAGGAGCTAACCGCTTTTTTGCACAACATGGGGGATCATGTAACTCGCCTTGATCGTTGGG |
| | AACCGGAGCTGAATGAAGCCATACCAAACGACGAGCGTGACACCACGATGCCTGTAGCAATGGCAACAACGTTGCGCAAACTATTAACTGGCGAACTA |
| | CTTACTCTAGCTTCCCGGCAACAATTAATAGACTGGATGGAGGCGGATAAAGTTGCAGGACCACTTCTGCGCTCGGCCCTTCCGGCTGGCTGGTTTAT |
| | TGCTGATAAATCTGGAGCCGGTGAGCGTGGGTCTCGCGGTATCATTGCAGCACTGGGGCCAGATGGTAAGCCCTCCCGTATCGTAGTTATCTACACGA |
| | CGGGGAGTCAGGCAACTATGGATGAACGAAATAGACAGATCGCTGAGATAGGTGCCTCACTGATTAAGCATTGGTAACTGTCAGACCAAGTTTACTCA |
| | TATATACTTTAGATTGATTTAAAACTTCATTTTTAATTTAAAAGGATCTAGGTGAAGATCCTTTTTGATAATCTCATGACCAAAATCCCTTAACGTGA |
| | GTTTTCGTTCCACTGAGCGTCAGACCCCGTAGAAAAGATCAAAGGATCTTCTTGAGATCCTTTTTTTCTGCGCGTAATCTGCTGCTTGCAAACAAAAA |
| | AACCACCGCTACCAGCGGTGGTTTGTTTGCCGGATCAAGAGCTACCAACTCTTTTTCCGAAGGTAACTGGCTTCAGCAGAGCGCAGATACCAAATACT |
| | GTCCTTCTAGTGTAGCCGTAGTTAGGCCACCACTTCAAGAACTCTGTAGCACCGCCTACATACCTCGCTCTGCTAATCCTGTTACCAGTGGCTGCTGC |
| | CAGTGGCGATAAGTCGTGTCTTACCGGGTTGGACTCAAGACGATAGTTACCGGATAAGGCGCAGCGGTCGGGCTGAACGGGGGGTTCGTGCACACAGC |
| | CCAGCTTGGAGCGAACGACCTACACCGAACTGAGATACCTACAGCGTGAGCATTGAGAAAGCGCCACGCTTCCCGAAGGGAGAAAGGCGGACAGGTAT |
| | CCGGTAAGCGGCAGGGTCGGAACAGGAGAGCGCACGAGGGAGCTTCCAGGGGGAAACGCCTGGTATCTTTATAGTCCTGTCGGGTTTCGCCACCTCTG |
| | ACTTGAGCGTCGATTTTTGTGATGCTCGTCAGGGGGGCGGAGCCTATGGAAAAACGCCAGCAACGCGGCCTTTTTACGGTTCCTGGCCTTTTGCTGGC |
| | CTTTTGCTCACATGTTCTTTCCTGCGTTATCCCCTGATTCTGTGGATAACCGTATTACCGCCTTTGAGTGAGCTGATACCGCTCGCCGCAGCCGAACG |
| | ACCGAGCGCAGCGAGTCAGTGAGCGAGGAAGCGGAAGAGCGCCTGATGCGGTATTTTCTCCTTACGCATCTGTGCGGTATTTCACACCGCAGACCAGC |
| | CGCGTAACCTGGCAAAATCGGTTACGGTTGAGTAATAAATGGATGCCCTGCGTAAGCGGGTGTGGGCGGACAATAAAGTCTTAAACTGAACAAAATAG |
| | ATCTAAACTATGACAATAAAGTCTTAAACTAGACAGAATAGTTGTAAACTGAAATCAGTCCAGTTATGCTGTGAAAAAGCATACTGGACTTTTGTTAT |
| | GGCTAAAGCAAACTCTTCATTTTCTGAAGTGCAAATTGCCCGTCGTATTAAAGAGGGGCGTGGCCAAGGGCATGGTAAAGACTATATTCGCGGCGTTG |
| | TGACAATTTACCGAACAACTCCGCGGCCGGGAAGCCGATCTCGGCTTGAACGAATTGTTAGGTGGCGGTACTTGGGTCGATATCAAAGTGCATCACTT |
| | CTTCCCGTATGCCCAACTTTGTATAGAGAGCCACTGCGGGATCGTCACCGTAATCTGCTTGCACGTAGATCACATAAGCACCAAGCGCGTTGGCCTCA |
| | TGCTTGAGGAGATTGATGAGCGCGGTGGCAATGCCCTGCCTCCGGTGCTCGCCGGAGACTGCGAGATCATAGATATAGATCTCACTACGCGGCTGCTC |
| | AAACCTGGGCAGAACGTAAGCCGCGAGAGCGCCAACAACCGCTTCTTGGTCGAAGGCAGCAAGCGCGATGAATGTCTTACTACGGAGCAAGTTCCCGA |
| | GGTAATCGGAGTCCGGCTGATGTTGGGAGTAGGTGGCTACGTCTCCGAACTCACGACCGAAAAGATCAAGAGCAGCCCGCATGGATTTGACTTGGTCA |
| | GGGCCGAGCCTACATGTGCGAATGATGCCCATACTTGAGCCACCTAACTTTGTTTTAGGGCGACTGCCCTGCTGCGTAACATCGTTGCTGCTGCGTAA |
| | CATCGTTGCTGCTCCATAACATCAAACATCGACCCACGGCGTAACGCGCTTGCTGCTTGGATGCCCGAGGCATAGACTGTACAAAAAAACAGTCATAA |
| | CAAGCCATGAAAACCGCCACTGCGCCGTTACCACCGCTGCGTTCGGTCAAGGTTCTGGACCAGTTGCGTGAGCGCATACGCTACTTGCATTACAGTTT |
| | ACGAACCGAACAGGCTTATGTCAACTGGGTTCGTGCCTTCATCCGTTTCCACGGTGTGCGTCACCCGGCAACCTTGGGCAGCAGCGAAGTCGAGGCAT |
| | TTCTGTCCTGGCTGGCGAACGAGCGCAAGGTTTCGGTCTCCACGCATCGTCAGGCATTGGCGGCCTTGCTGTTCTTCTACGGCAAGGTGCTGTGCACG |
| | GATCTGCCCTGGCTTCAGGAGATCGGAAGACCTCGGCCGTCGCGGCGCTTGCCGGTGGTGCTGACCCCGGATGAAGTGGTTCGCATCCTCGGTTTTCT |
| | GGAAGGCGAGCATCGTTTGTTCGCCCAGGACTCTAGCTATAGTTCTAGTGGTTGGCTACGTATACTCCGGAATATTAATAGATCATGGAGATAATTAA |
| | AATGATAACCATCTCGCAAATAAATAAGTATTTTACTGTTTTCGTAACAGTTTTGTAATAAAAAAACCTATAAATATTCCGGATTATTCATACCGTCC |
| | CACCATCGGGCGCGGATCTCGGTCCGAAACCATGTCGTACTACCATCACCATCACCATCACGATTACGATATCCCAACGACCGAAAACCTGTATTTTC |
| | AGGGCGCCATGGGATCCGGCCGGCCCCTGCAGGCAGCTGCGCGCTCGCTCGCTCACTGAGGCCGCCCGGGCAAAGCCCGGGCGTCGGGCGACCTTTGG |
| | TCGCCCGGCCTCAGTGAGCGAGCGAGCGCGCAGAGAGGGAGTGGCCAACTCCATCACTAGGGGTTCCTTGTAGTTAATGATTAACCCGCCATGCTACT |
| | TATCTACGTAGCCATGCTCTAGAGCGGCCGCCCCTAAAATGGGCAAACATTGCAAGCAGCAAACAGCAAACACACAGCCCTCCCTGCCTGCTGACCTT |
| | GGAGCTGGGGCAGAGGTCAGAGACCTCTCTGGGCCCATGCCACCTCCAACATCCACTCGACCCCTTGGAATTTTTCGGTGGAGAGGAGCAGAGGTTGT |
| | CCTGGCGTGGTTTAGGTAGTGTGAGAGGGGAATGACTCCTTTCGGTAAGTGCAGTGGAAGCTGTACACTGCCCAGGCAAAGCGTCCGGGCAGCGTAGG |
| | CGGGCGACTCAGATCCCAGCCAGTGGACTTAGCCCCTGTTTGCTCCTCCGATAACTGGGGTGACCTTGGTTAATATTCACCAGCAGCCTCCCCCGTTG |
| | CCCCTCTGGATCCACTGCTTAAATACGGACGAGGACAGGGCCCTGTCTCCTCAGCTTCAGGCACCACCACTGACCTGGGACAGTGAATCCGGACTCTA |
| | AGGTAAATATAAAATTTTTAAGTGTATAATGTGTTAAACTACTGATTCTAATTGTTTCTCTCTTTTAGATTCCAACCTTTGGAACTGAGTTTAAACCG |
| | CAGCCACCATGCAGATCGAGCTGTCTACCTGCTTCTTCCTGTGCCTGCTGCGGTTCTGCTTCAGCGCCACCAGAAGATATTACCTGGGCGCCGTGGAA |
| | CTGAGCTGGGACTACATGCAGTCTGACCTGGGAGAGCTGCCCGTGGACGCTAGATTTCCTCCAAGAGTGCCCAAGAGCTTCCCCTTCAACACCTCCGT |
| | GGTGTACAAGAAAACCCTGTTCGTGGAATTCACCGACCACCTGTTCAATATCGCCAAGCCTCGGCCTCCTTGGATGGGACTGCTGGGACCTACAATTC |
| | AGGCCGAGGTGTACGACACCGTGGTCATCACCCTGAAGAACATGGCCAGCCATCCTGTGTCTCTGCACGCCGTGGGAGTGTCTTATTGGAAGGCTTCT |
| | GAGGGCGCCGAGTACGACGATCAGACAAGCCAGAGAGAGAAAGAGGACGACAAGGTTTTCCCTGGCGGCAGCCACACCTATGTCTGGCAGGTCCTGAA |
| | AGAAAACGGCCCTATGGCCTCCGATCCTCTGTGCCTGACATACAGCTACCTGAGCCACGTGGACCTGGTCAAGGACCTGAATTCTGGCCTGATCGGAG |
| | CCCTGCTCGTGTGTAGAGAAGGCAGCCTGGCCAAAGAGAAAACCCAGACACTGCACAAGTTCATCCTGCTGTTCGCCGTGTTCGACGAGGGCAAGAGC |
| | TGGCACAGCGAGACAAAGAACAGCCTGATGCAGGACAGGGATGCCGCCTCTGCTAGAGCTTGGCCTAAGATGCACACCGTGAACGGCTACGTGAACAG |
| | AAGCCTGCCTGGACTGATCGGCTGCCACAGAAAGTCCGTGTACTGGCACGTGATCGGCATGGGCACAACACCTGAGGTGCACAGCATCTTTCTGGAAG |
| | GCCACACCTTCCTCGTGCGGAACCACAGACAGGCCAGCCTGGAAATCAGCCCTATCACCTTCCTGACCGCTCAGACCCTGCTGATGGATCTGGGCCAG |
| | TTTCTGCTGTTCTGCCACATCAGCTCCCACCAGCACGATGGCATGGAAGCCTACGTGAAGGTGGACAGCTGCCCCGAAGAACCCCAGCTGCGGATGAA |
| | GAACAACGAGGAAGCCGAGGACTACGACGACGACCTGACCGACTCTGAGATGGACGTCGTCAGATTCGACGACGATAACAGCCCCAGCTTCATCCAGA |
| | TCAGAAGCGTGGCCAAGAAGCACCCCAAGACCTGGGTGCACTATATCGCCGCCGAGGAAGAGGACTGGGATTACGCTCCTCTGGTGCTGGCCCCTGAC |
| | GACAGAAGCTACAAGAGCCAGTACCTGAACAACGGCCCTCAGCGGATCGGCCGGAAGTATAAGAAAGTGCGGTTCATGGCCTACACCGACGAGACATT |
| | CAAGACCAGAGAGGCCATCCAGCACGAGAGCGGAATTCTGGGCCCTCTGCTGTATGGCGAAGTGGGCGATACACTGCTGATCATCTTCAAGAACCAGG |
| | CCAGCAGACCCTACAACATCTACCCTCACGGCATCACCGATGTGCGGCCCCTGTATTCTAGAAGGCTGCCCAAGGGCGTGAAGCACCTGAAGGACTTC |
| | CCTATCCTGCCTGGCGAGATTTTCAAGTACAAGTGGACCGTGACCGTGGAAGATGGCCCCACCAAGAGCGACCCTAGATGTCTGACACGGTACTACAG |
| | CAGCTTCGTGAACATGGAACGCGACCTGGCCAGCGGCCTGATTGGACCTCTGCTGATCTGCTACAAAGAAAGCGTGGACCAGCGGGGCAACCAGATCA |
| | TGAGCGACAAGCGGAACGTGATCCTGTTTAGCGTGTTCGATGAGAACCGGTCCTGGTATCTGACCGAGAACATCCAGCGGTTTCTGCCCAATCCTGCC |
| | GGGGTGCAACTGGAAGATCCTGAGTTCCAGGCAAGCAACATCATGCACTCCATCAATGGCTATGTGTTCGACAGCCTGCAGCTGAGCGTGTGCCTGCA |
| | CGAAGTGGCCTACTGGTACATCCTGAGCATTGGCGCCCAGACCGACTTCCTGTCCGTGTTCTTTAGCGGCTACACCTTCAAGCACAAGATGGTGTACG |
| | AGGATACCCTGACACTGTTCCCATTCAGCGGCGAGACAGTGTTCATGAGCATGGAAAACCCCGGCCTGTGGATTCTGGGCTGTCACAACAGCGACTTC |
| | CGGAACAGAGGCATGACAGCCCTGCTGAAGGTGTCCAGCTGCGACAAGAACACCGGCGACTACTACGAGGACAGCTATGAGGACATCAGCGCCTACCT |
| | GCTGAGCAAGAACAATGCCATCGAGCCCAGAAGCTTCAGCCAGAATAGCAGACACCCCTCCACCAGACAGAAGCAGTTCAACGCCACAACAATCCCCG |
| | AGAACGACATCGAGAAAACCGATCCTTGGTTTGCCCACAGAACCCCTATGCCTAAGATCCAGAACGTGTCCTCCAGCGATCTGCTGATGCTCCTGAGA |
| | CAGAGCCCTACACCTCACGGACTGAGCCTGTCCGATCTGCAAGAGGCCAAATACGAAACCTTCAGCGACGACCCTTCTCCTGGCGCCATCGACAGCAA |
| | CAATAGCCTGAGCGAGATGACCCACTTCAGACCACAGCTGCACCACAGCGGCGACATGGTGTTTACACCTGAGAGCGGCCTCCAGCTGAGACTGAATG |
| | AGAAGCTGGGAACCACCGCCGCCACCGAGCTGAAGAAACTGGACTTCAAGGTGTCCTCTACCAGCAACAACCTGATCAGCACAATCCCCTCCGACAAC |
| | CTGGCTGCCGGCACCGACAACACATCTTCTCTGGGCCCACCTAGCATGCCCGTGCACTACGATAGCCAGCTGGATACCACACTGTTCGGCAAGAAGTC |
| | TAGCCCTCTGACAGAGTCTGGCGGCCCTCTGTCTCTGAGCGAGGAAAACAACGACAGCAAGCTGCCTCCTGTGCTGAAGCGGCACCAGCGGGAAATCA |
| | CCAGAACCACACTGCAGAGCGACCAAGAGGAAATCGATTACGACGACACCATCAGCGTCGAGATGAAGAAAGAAGATTTCGACATCTACGACGAGGAC |
| | GAGAATCAGAGCCCCAGATCCTTTCAGAAAAAGACCCGGCACTACTTCATTGCCGCCGTCGAGAGACTGTGGGACTACGGCATGTCTAGCAGCCCTCA |
| | CGTGCTGAGAAATAGAGCCCAGAGCGGCAGCGTGCCCCAGTTCAAGAAAGTGGTGTTCCAAGAGTTCACCGACGGCAGCTTCACCCAGCCACTGTATA |
| | GAGGCGAGCTGAACGAGCATCTGGGCCTGCTGGGCCCTTATATCAGAGCCGAAGTGGAAGATAACATCATGGTCACCTTCCGGAATCAGGCTAGCCGG |
| | CCTTACAGCTTCTACAGCTCCCTGATCTCCTACGAAGAGGACCAGAGACAGGGCGCTGAGCCCCGGAAGAATTTCGTGAAGCCCAACGAGACTAAGAC |
| | CTACTTTTGGAAGGTGCAGCACCACATGGCCCCTACAAAGGACGAGTTCGACTGCAAAGCCTGGGCCTACTTCTCCGATGTGGATCTGGAAAAGGACG |
| | TGCACAGCGGGCTCATCGGACCACTGCTTGTGTGCCACACCAACACACTGAACCCCGCTCACGGCAGACAAGTGACAGTGCAAGAGTTCGCCCTGTTC |
| | TTCACCATCTTCGACGAAACAAAGAGCTGGTACTTCACCGAGAATATGGAACGGAACTGCAGGGCCCCTTGCAACATCCAGATGGAAGATCCCACCTT |
| | CAAAGAGAACTACCGGTTCCACGCCATCAACGGCTACATCATGGACACACTGCCCGGCCTGGTTATGGCCCAGGATCAGAGAATCCGGTGGTATCTGC |
| | TGTCCATGGGCTCCAACGAGAATATCCACAGCATCCACTTCAGCGGCCACGTGTTCACCGTGCGGAAAAAAGAAGAGTACAAAATGGCCCTGTACAAT |
| | CTGTACCCTGGGGTGTTCGAAACCGTGGAAATGCTGCCTTCCAAGGCCGGCATTTGGAGAGTGGAATGTCTGATTGGAGAGCACCTCCACGCCGGAAT |
| | GAGCACCCTGTTTCTGGTGTACTCCAACAAGTGTCAGACCCCTCTCGGCATGGCCTCTGGACACATCAGAGACTTCCAGATCACCGCCTCTGGCCAGT |
| | ACGGACAGTGGGCTCCTAAACTGGCTCGGCTGCACTACTCCGGCAGCATCAATGCCTGGTCCACCAAAGAGCCCTTCAGCTGGATCAAGGTGGACCTG |
| | CTGGCTCCCATGATCATCCACGGAATCAAGACCCAGGGCGCAAGACAGAAGTTCAGCAGCCTGTACATCAGCCAGTTCATCATCATGTACAGCCTGGA |
| | CGGAAAGAAGTGGCAGACCTACCGGGGCAATAGCACCGGCACACTCATGGTGTTCTTCGGCAACGTGGACTCCAGCGGCATTAAGCACAACATCTTCA |
| | ACCCTCCAATCATTGCCCGGTACATCCGGCTGCACCCCACACACTACAGCATCCGGTCTACCCTGAGAATGGAACTGATGGGCTGCGACCTGAACAGC |
| | TGCTCTATGCCCCTCGGAATGGAAAGCAAGGCCATCAGCGACGCCCAGATCACAGCCAGCAGCTACTTCACCAACATGTTCGCCACTTGGAGCCCCTC |
| | CAAGGCTAGACTGCATCTGCAGGGCAGAAGCAACGCTTGGAGGCCCCAAGTGAACAACCCCAAAGAGTGGCTGCAGGTTGACTTTCAAAAGACCATGA |
| | AAGTGACCGGCGTGACCACACAGGGCGTCAAGTCTCTGCTGACCTCTATGTACGTGAAAGAGTTCCTGATTAGCAGCAGCCAGGACGGCCACCAGTGG |
| | ACCCTGTTTTTCCAGAACGGCAAAGTGAAAGTGTTCCAGGGCAATCAGGACAGCTTCACACCCGTGGTCAATTCTCTGGACCCTCCACTGCTGACCAG |
| | ATACCTGCGGATTCACCCTCAGTCTTGGGTGCACCAGATCGCTCTGCGGATGGAAGTGCTGGGCTGTGAAGCTCAGGACCTCTACTAGTTAATTAAGA |
| | GCATCTTACCGCCATTTATTCCCATATTTGTTCTGTTTTTCTTGATTTGGGTATACATTTAAATGTTAATAAAACAAAATGGTGGGGCAATCATTTAC |
| | ATTTTTAGGGATATGTAATTACTAGTTCAGGTGTATTGCCACAAGACAAACATGTTAAGAAACTTTCCCGTTATTTACGCTCTGTTCCTGTTAATCAA |
| | CCTCTGGATTACAAAATTTGTGAAAGATTGACTGATATTCTTAACTATGTTGCTCCTTTTACGCTGTGTGGATATGCTGCTTTATAGCCTCTGTATCT |
| | AGCTATTGCTTCCCGTACGGCTTTCGTTTTCTCCTCCTTGTATAAATCCTGGTTGCTGTCTCTTTTAGAGGAGTTGTGGCCCGTTGTCCGTCAACGTG |
| | GCGTGGTGTGCTCTGTGTTTGCTGACGCAACCCCCACTGGCTGGGGCATTGCCACCACCTGTCAACTCCTTTCTGGGACTTTCGCTTTCCCCCTCCCG |
| | ATCGCCACGGCAGAACTCATCGCCGCCTGCCTTGCCCGCTGCTGGACAGGGGCTAGGTTGCTGGGCACTGATAATTCCGTGGTGTTGTCTGTGCCTTC |
| | TAGTTGCCAGCCATCTGTTGTTTGCCCCTCCCCCGTGCCTTCCTTGACCCTGGAAGGTGCCACTCCCACTGTCCTTTCCTAATAAAATGAGGAAATTG |
| | CATCGCATTGTCTGAGTAGGTGTCATTCTATTCTGGGGGGTGGGGTGGGGCAGGACAGCAAGGGGGAGGATTGGGAAGACAATAGCAGGCATGCTGGG |
| | GATGCGGTGGGCTCTATGGCTCTAGAGCATGGCTACGTAGATAAGTAGCATGGCGGGTTAATCATTAACTACACCTGCAGGAGGAACCCCTAGTGATG |
| | GAGTTGGCCACTCCCTCTCTGCGCGCTCGCTCGCTCACTGAGGCCGGGCGACCAAAGGTCGCCCGACGCCCGGGCGGCCTCAGTGAGCGAGCGAGCGC |
| | GCAGCTGCCTGCAGGGGCGCGCCTCGAGGCATGCGGTACCAAGCTTGTCGAGAAGTACTAGAGGATCATAATCAGCCATACCACATTTGTAGAGGTTT |
| | TACTTGCTTTAAAAAACCTCCCACACCTCCCCCTGAACCTGAAACATAAAATGAATGCAATTGTTGTTGTTAACTTGTTTATTGCAGCTTATAATGGT |
| | TACAAATAAAGCAATAGCATCACAAATTTCACAAATAAAGCATTTTTTTCACTGCATTCTAGTTGTGGTTTGTCCAAACTCATCAATGTATCTTATCA |
| | TGTCTGGATCTGATCACTGATATCGCCTAGGAGATCCGAACCAGATAAGTGAAATCTAGTTCCAAACTATTTTGTCATTTTTAATTTTCGTATTAGCT |
| | TACGACGCTACACCCAGTTCCCATCTATTTTGTCACTCTTCCCTAAATAATCCTTAAAAACTCCATTTCCACCCCTCCCAGTTCCCAACTATTTTGTC |
| | CGCCCACAGCGGGGCATTTTTCTTCCTGTTATGTTTTTAATCAAACATCCTGCCAACTCCATGTGACAAACCGTCATCTTCGGCTACTTTTTCTCTGT |
| | CACAGAATGAAAATTTTTCTGTCATCTCTTCGTTATTAATGTTTGTAATTGACTGAATATCAACGCTTATTTGCAGCCTGAATGGCGAATGG |
| ceDNAFVIII- | GACGCGCCCTGTAGCGGCGCATTAAGCGCGGCGGGTGTGGTGGTTACGCGCAGCGTGACCGCTACACTTGCCAGCGCCCTAGCGCCCGCTCCTTTCGC |
| vector 8 | TTTCTTCCCTTCCTTTCTCGCCACGTTCGCCGGCTTTCCCCGTCAAGCTCTAAATCGGGGGCTCCCTTTAGGGTTCCGATTTAGTGCTTTACGGCACC |
| (SEQ ID NO: | TCGACCCCAAAAAACTTGATTAGGGTGATGGTTCACGTAGTGGGCCATCGCCCTGATAGACGGTTTTTCGCCCTTTGACGTTGGAGTCCACGTTCTTT |
| 199) | AATAGTGGACTCTTGTTCCAAACTGGAACAACACTCAACCCTATCTCGGTCTATTCTTTTGATTTATAAGGGATTTTGCCGATTTCGGCCTATTGGTT |
| | AAAAAATGAGCTGATTTAACAAAAATTTAACGCGAATTTTAACAAAATATTAACGTTTACAATTTCAGGTGGCACTTTTCGGGGAAATGTGCGCGGAA |
| | CCCCTATTTGTTTATTTTTCTAAATACATTCAAATATGTATCCGCTCATGAGACAATAACCCTGATAAATGCTTCAATAATATTGAAAAAGGAAGAGT |
| | ATGAGTATTCAACATTTCCGTGTCGCCCTTATTCCCTTTTTTGCGGCATTTTGCCTTCCTGTTTTTGCTCACCCAGAAACGCTGGTGAAAGTAAAAGA |
| | TGCTGAAGATCAGTTGGGTGCACGAGTGGGTTACATCGAACTGGATCTCAACAGCGGTAAGATCCTTGAGAGTTTTCGCCCCGAAGAACGTTTTCCAA |
| | TGATGAGCACTTTTAAAGTTCTGCTATGTGGCGCGGTATTATCCCGTATTGACGCCGGGCAAGAGCAACTCGGTCGCCGCATACACTATTCTCAGAAT |
| | GACTTGGTTGAGTACTCACCAGTCACAGAAAAGCATCTTACGGATGGCATGACAGTAAGAGAATTATGCAGTGCTGCCATAACCATGAGTGATAACAC |
| | TGCGGCCAACTTACTTCTGACAACGATCGGAGGACCGAAGGAGCTAACCGCTTTTTTGCACAACATGGGGGATCATGTAACTCGCCTTGATCGTTGGG |
| | AACCGGAGCTGAATGAAGCCATACCAAACGACGAGCGTGACACCACGATGCCTGTAGCAATGGCAACAACGTTGCGCAAACTATTAACTGGCGAACTA |
| | CTTACTCTAGCTTCCCGGCAACAATTAATAGACTGGATGGAGGCGGATAAAGTTGCAGGACCACTTCTGCGCTCGGCCCTTCCGGCTGGCTGGTTTAT |
| | TGCTGATAAATCTGGAGCCGGTGAGCGTGGGTCTCGCGGTATCATTGCAGCACTGGGGCCAGATGGTAAGCCCTCCCGTATCGTAGTTATCTACACGA |
| | CGGGGAGTCAGGCAACTATGGATGAACGAAATAGACAGATCGCTGAGATAGGTGCCTCACTGATTAAGCATTGGTAACTGTCAGACCAAGTTTACTCA |
| | TATATACTTTAGATTGATTTAAAACTTCATTTTTAATTTAAAAGGATCTAGGTGAAGATCCTTTTTGATAATCTCATGACCAAAATCCCTTAACGTGA |
| | GTTTTCGTTCCACTGAGCGTCAGACCCCGTAGAAAAGATCAAAGGATCTTCTTGAGATCCTTTTTTTCTGCGCGTAATCTGCTGCTTGCAAACAAAAA |
| | AACCACCGCTACCAGCGGTGGTTTGTTTGCCGGATCAAGAGCTACCAACTCTTTTTCCGAAGGTAACTGGCTTCAGCAGAGCGCAGATACCAAATACT |
| | GTCCTTCTAGTGTAGCCGTAGTTAGGCCACCACTTCAAGAACTCTGTAGCACCGCCTACATACCTCGCTCTGCTAATCCTGTTACCAGTGGCTGCTGC |
| | CAGTGGCGATAAGTCGTGTCTTACCGGGTTGGACTCAAGACGATAGTTACCGGATAAGGCGCAGCGGTCGGGCTGAACGGGGGGTTCGTGCACACAGC |
| | CCAGCTTGGAGCGAACGACCTACACCGAACTGAGATACCTACAGCGTGAGCATTGAGAAAGCGCCACGCTTCCCGAAGGGAGAAAGGCGGACAGGTAT |
| | CCGGTAAGCGGCAGGGTCGGAACAGGAGAGCGCACGAGGGAGCTTCCAGGGGGAAACGCCTGGTATCTTTATAGTCCTGTCGGGTTTCGCCACCTCTG |
| | ACTTGAGCGTCGATTTTTGTGATGCTCGTCAGGGGGGCGGAGCCTATGGAAAAACGCCAGCAACGCGGCCTTTTTACGGTTCCTGGCCTTTTGCTGGC |
| | CTTTTGCTCACATGTTCTTTCCTGCGTTATCCCCTGATTCTGTGGATAACCGTATTACCGCCTTTGAGTGAGCTGATACCGCTCGCCGCAGCCGAACG |
| | ACCGAGCGCAGCGAGTCAGTGAGCGAGGAAGCGGAAGAGCGCCTGATGCGGTATTTTCTCCTTACGCATCTGTGCGGTATTTCACACCGCAGACCAGC |
| | CGCGTAACCTGGCAAAATCGGTTACGGTTGAGTAATAAATGGATGCCCTGCGTAAGCGGGTGTGGGCGGACAATAAAGTCTTAAACTGAACAAAATAG |
| | ATCTAAACTATGACAATAAAGTCTTAAACTAGACAGAATAGTTGTAAACTGAAATCAGTCCAGTTATGCTGTGAAAAAGCATACTGGACTTTTGTTAT |
| | GGCTAAAGCAAACTCTTCATTTTCTGAAGTGCAAATTGCCCGTCGTATTAAAGAGGGGCGTGGCCAAGGGCATGGTAAAGACTATATTCGCGGCGTTG |
| | TGACAATTTACCGAACAACTCCGCGGCCGGGAAGCCGATCTCGGCTTGAACGAATTGTTAGGTGGCGGTACTTGGGTCGATATCAAAGTGCATCACTT |
| | CTTCCCGTATGCCCAACTTTGTATAGAGAGCCACTGCGGGATCGTCACCGTAATCTGCTTGCACGTAGATCACATAAGCACCAAGCGCGTTGGCCTCA |
| | TGCTTGAGGAGATTGATGAGCGCGGTGGCAATGCCCTGCCTCCGGTGCTCGCCGGAGACTGCGAGATCATAGATATAGATCTCACTACGCGGCTGCTC |
| | AAACCTGGGCAGAACGTAAGCCGCGAGAGCGCCAACAACCGCTTCTTGGTCGAAGGCAGCAAGCGCGATGAATGTCTTACTACGGAGCAAGTTCCCGA |
| | GGTAATCGGAGTCCGGCTGATGTTGGGAGTAGGTGGCTACGTCTCCGAACTCACGACCGAAAAGATCAAGAGCAGCCCGCATGGATTTGACTTGGTCA |
| | GGGCCGAGCCTACATGTGCGAATGATGCCCATACTTGAGCCACCTAACTTTGTTTTAGGGCGACTGCCCTGCTGCGTAACATCGTTGCTGCTGCGTAA |
| | CATCGTTGCTGCTCCATAACATCAAACATCGACCCACGGCGTAACGCGCTTGCTGCTTGGATGCCCGAGGCATAGACTGTACAAAAAAACAGTCATAA |
| | CAAGCCATGAAAACCGCCACTGCGCCGTTACCACCGCTGCGTTCGGTCAAGGTTCTGGACCAGTTGCGTGAGCGCATACGCTACTTGCATTACAGTTT |
| | ACGAACCGAACAGGCTTATGTCAACTGGGTTCGTGCCTTCATCCGTTTCCACGGTGTGCGTCACCCGGCAACCTTGGGCAGCAGCGAAGTCGAGGCAT |
| | TTCTGTCCTGGCTGGCGAACGAGCGCAAGGTTTCGGTCTCCACGCATCGTCAGGCATTGGCGGCCTTGCTGTTCTTCTACGGCAAGGTGCTGTGCACG |
| | GATCTGCCCTGGCTTCAGGAGATCGGAAGACCTCGGCCGTCGCGGCGCTTGCCGGTGGTGCTGACCCCGGATGAAGTGGTTCGCATCCTCGGTTTTCT |
| | GGAAGGCGAGCATCGTTTGTTCGCCCAGGACTCTAGCTATAGTTCTAGTGGTTGGCTACGTATACTCCGGAATATTAATAGATCATGGAGATAATTAA |
| | AATGATAACCATCTCGCAAATAAATAAGTATTTTACTGTTTTCGTAACAGTTTTGTAATAAAAAAACCTATAAATATTCCGGATTATTCATACCGTCC |
| | CACCATCGGGCGCGGATCTCGGTCCGAAACCATGTCGTACTACCATCACCATCACCATCACGATTACGATATCCCAACGACCGAAAACCTGTATTTTC |
| | AGGGCGCCATGGGATCCGGCCGGCCCCTGCAGGCAGCTGCGCGCTCGCTCGCTCACTGAGGCCGCCCGGGCAAAGCCCGGGCGTCGGGCGACCTTTGG |
| | TCGCCCGGCCTCAGTGAGCGAGCGAGCGCGCAGAGAGGGAGTGGCCAACTCCATCACTAGGGGTTCCTTGTAGTTAATGATTAACCCGCCATGCTACT |
| | TATCTACGTAGCCATGCTCTAGAGCGGCCGCGGCTCCGGTGCCCGTCAGTGGGCAGAGCGCACATCGCCCACAGTCCCCGAGAAGTTGGGGGGAGGGG |
| | TCGGCAATTGAACCGGTGCCTAGAGAAGGTGGCGCGGGGTAAACTGGGAAAGTGATGTCGTGTACTGGCTCCGCCTTTTTCCCGAGGGTGGGGGAGAA |
| | CCGTATATAAGTGCAGTAGTCGCCGTGAACGTTCTTTTTCGCAACGGGTTTGCCGCCAGAACACAGGTAAGTGCCGTGTGTGGTTCCCGCGGGCCTGG |
| | CCTCTTTACGGGTTATGGCCCTTGCGTGCCTTGAATTACTTCCACCTGGCTGCAGTACGTGATTCTTGATCCCGAGCTTCGGGTTGGAAGTGGGTGGG |
| | AGAGTTCGAGGCCTTGCGCTTAAGGAGCCCCTTCGCCTCGTGCTTGAGTTGAGGCCTGGCCTGGGCGCTGGGGCCGCCGCGTGCGAATCTGGTGGCAC |
| | CTTCGCGCCTGTCTCGCTGCTTTCGATAAGTCTCTAGCCATTTAAAATTTTTGATGACCTGCTGCGACGCTTTTTTTCTGGCAAGATAGTCTTGTAAA |
| | TGCGGGCCAAGATCTGCACACTGGTATTTCGGTTTTTGGGGCCGCGGGCGGCGACGGGGCCCGTGCGTCCCAGCGCACATGTTCGGCGAGGCGGGGCC |
| | TGCGAGCGCGGCCACCGAGAATCGGACGGGGGTAGTCTCAAGCTGGCCGGCCTGCTCTGGTGCCTGGTCTCGCGCCGCCGTGTATCGCCCCGCCCTGG |
| | GCGGCAAGGCTGGCCCGGTCGGCACCAGTTGCGTGAGCGGAAAGATGGCCGCTTCCCGGCCCTGCTGCAGGGAGCTCAAAATGGAGGACGCGGCGCTC |
| | GGGAGAGCGGGCGGGTGAGTCACCCACACAAAGGAAAAGGGCCTTTCCGTCCTCAGCCGTCGCTTCATGTGACTCCACGGAGTACCGGGCGCCGTCCA |
| | GGCACCTCGATTAGTTCTCGAGCTTTTGGAGTACGTCGTCTTTAGGTTGGGGGGAGGGGTTTTATGCGATGGAGTTTCCCCACACTGAGTGGGTGGAG |
| | ACTGAAGTTAGGCCAGCTTGGCACTTGATGTAATTCTCCTTGGAATTTGCCCTTTTTGAGTTTGGATCTTGGTTCATTCTCAAGCCTCAGACAGTGGT |
| | TCAAAGTTTTTTTCTTCCATTTCAGGTGTCGTGAGTTTAAACCGCAGCCACCATGCAGATCGAGCTGTCTACCTGCTTCTTCCTGTGCCTGCTGCGGT |
| | TCTGCTTCAGCGCCACCAGAAGATATTACCTGGGCGCCGTGGAACTGAGCTGGGACTACATGCAGTCTGACCTGGGAGAGCTGCCCGTGGACGCTAGA |
| | TTTCCTCCAAGAGTGCCCAAGAGCTTCCCCTTCAACACCTCCGTGGTGTACAAGAAAACCCTGTTCGTGGAATTCACCGACCACCTGTTCAATATCGC |
| | CAAGCCTCGGCCTCCTTGGATGGGACTGCTGGGACCTACAATTCAGGCCGAGGTGTACGACACCGTGGTCATCACCCTGAAGAACATGGCCAGCCATC |
| | CTGTGTCTCTGCACGCCGTGGGAGTGTCTTATTGGAAGGCTTCTGAGGGCGCCGAGTACGACGATCAGACAAGCCAGAGAGAGAAAGAGGACGACAAG |
| | GTTTTCCCTGGCGGCAGCCACACCTATGTCTGGCAGGTCCTGAAAGAAAACGGCCCTATGGCCTCCGATCCTCTGTGCCTGACATACAGCTACCTGAG |
| | CCACGTGGACCTGGTCAAGGACCTGAATTCTGGCCTGATCGGAGCCCTGCTCGTGTGTAGAGAAGGCAGCCTGGCCAAAGAGAAAACCCAGACACTGC |
| | ACAAGTTCATCCTGCTGTTCGCCGTGTTCGACGAGGGCAAGAGCTGGCACAGCGAGACAAAGAACAGCCTGATGCAGGACAGGGATGCCGCCTCTGCT |
| | AGAGCTTGGCCTAAGATGCACACCGTGAACGGCTACGTGAACAGAAGCCTGCCTGGACTGATCGGCTGCCACAGAAAGTCCGTGTACTGGCACGTGAT |
| | CGGCATGGGCACAACACCTGAGGTGCACAGCATCTTTCTGGAAGGCCACACCTTCCTCGTGCGGAACCACAGACAGGCCAGCCTGGAAATCAGCCCTA |
| | TCACCTTCCTGACCGCTCAGACCCTGCTGATGGATCTGGGCCAGTTTCTGCTGTTCTGCCACATCAGCTCCCACCAGCACGATGGCATGGAAGCCTAC |
| | GTGAAGGTGGACAGCTGCCCCGAAGAACCCCAGCTGCGGATGAAGAACAACGAGGAAGCCGAGGACTACGACGACGACCTGACCGACTCTGAGATGGA |
| | CGTCGTCAGATTCGACGACGATAACAGCCCCAGCTTCATCCAGATCAGAAGCGTGGCCAAGAAGCACCCCAAGACCTGGGTGCACTATATCGCCGCCG |
| | AGGAAGAGGACTGGGATTACGCTCCTCTGGTGCTGGCCCCTGACGACAGAAGCTACAAGAGCCAGTACCTGAACAACGGCCCTCAGCGGATCGGCCGG |
| | AAGTATAAGAAAGTGCGGTTCATGGCCTACACCGACGAGACATTCAAGACCAGAGAGGCCATCCAGCACGAGAGCGGAATTCTGGGCCCTCTGCTGTA |
| | TGGCGAAGTGGGCGATACACTGCTGATCATCTTCAAGAACCAGGCCAGCAGACCCTACAACATCTACCCTCACGGCATCACCGATGTGCGGCCCCTGT |
| | ATTCTAGAAGGCTGCCCAAGGGCGTGAAGCACCTGAAGGACTTCCCTATCCTGCCTGGCGAGATTTTCAAGTACAAGTGGACCGTGACCGTGGAAGAT |
| | GGCCCCACCAAGAGCGACCCTAGATGTCTGACACGGTACTACAGCAGCTTCGTGAACATGGAACGCGACCTGGCCAGCGGCCTGATTGGACCTCTGCT |
| | GATCTGCTACAAAGAAAGCGTGGACCAGCGGGGCAACCAGATCATGAGCGACAAGCGGAACGTGATCCTGTTTAGCGTGTTCGATGAGAACCGGTCCT |
| | GGTATCTGACCGAGAACATCCAGCGGTTTCTGCCCAATCCTGCCGGGGTGCAACTGGAAGATCCTGAGTTCCAGGCAAGCAACATCATGCACTCCATC |
| | AATGGCTATGTGTTCGACAGCCTGCAGCTGAGCGTGTGCCTGCACGAAGTGGCCTACTGGTACATCCTGAGCATTGGCGCCCAGACCGACTTCCTGTC |
| | CGTGTTCTTTAGCGGCTACACCTTCAAGCACAAGATGGTGTACGAGGATACCCTGACACTGTTCCCATTCAGCGGCGAGACAGTGTTCATGAGCATGG |
| | AAAACCCCGGCCTGTGGATTCTGGGCTGTCACAACAGCGACTTCCGGAACAGAGGCATGACAGCCCTGCTGAAGGTGTCCAGCTGCGACAAGAACACC |
| | GGCGACTACTACGAGGACAGCTATGAGGACATCAGCGCCTACCTGCTGAGCAAGAACAATGCCATCGAGCCCAGAAGCTTCAGCCAGAATAGCAGACA |
| | CCCCTCCACCAGACAGAAGCAGTTCAACGCCACAACAATCCCCGAGAACGACATCGAGAAAACCGATCCTTGGTTTGCCCACAGAACCCCTATGCCTA |
| | AGATCCAGAACGTGTCCTCCAGCGATCTGCTGATGCTCCTGAGACAGAGCCCTACACCTCACGGACTGAGCCTGTCCGATCTGCAAGAGGCCAAATAC |
| | GAAACCTTCAGCGACGACCCTTCTCCTGGCGCCATCGACAGCAACAATAGCCTGAGCGAGATGACCCACTTCAGACCACAGCTGCACCACAGCGGCGA |
| | CATGGTGTTTACACCTGAGAGCGGCCTCCAGCTGAGACTGAATGAGAAGCTGGGAACCACCGCCGCCACCGAGCTGAAGAAACTGGACTTCAAGGTGT |
| | CCTCTACCAGCAACAACCTGATCAGCACAATCCCCTCCGACAACCTGGCTGCCGGCACCGACAACACATCTTCTCTGGGCCCACCTAGCATGCCCGTG |
| | CACTACGATAGCCAGCTGGATACCACACTGTTCGGCAAGAAGTCTAGCCCTCTGACAGAGTCTGGCGGCCCTCTGTCTCTGAGCGAGGAAAACAACGA |
| | CAGCAAGCTGCCTCCTGTGCTGAAGCGGCACCAGCGGGAAATCACCAGAACCACACTGCAGAGCGACCAAGAGGAAATCGATTACGACGACACCATCA |
| | GCGTCGAGATGAAGAAAGAAGATTTCGACATCTACGACGAGGACGAGAATCAGAGCCCCAGATCCTTTCAGAAAAAGACCCGGCACTACTTCATTGCC |
| | GCCGTCGAGAGACTGTGGGACTACGGCATGTCTAGCAGCCCTCACGTGCTGAGAAATAGAGCCCAGAGCGGCAGCGTGCCCCAGTTCAAGAAAGTGGT |
| | GTTCCAAGAGTTCACCGACGGCAGCTTCACCCAGCCACTGTATAGAGGCGAGCTGAACGAGCATCTGGGCCTGCTGGGCCCTTATATCAGAGCCGAAG |
| | TGGAAGATAACATCATGGTCACCTTCCGGAATCAGGCTAGCCGGCCTTACAGCTTCTACAGCTCCCTGATCTCCTACGAAGAGGACCAGAGACAGGGC |
| | GCTGAGCCCCGGAAGAATTTCGTGAAGCCCAACGAGACTAAGACCTACTTTTGGAAGGTGCAGCACCACATGGCCCCTACAAAGGACGAGTTCGACTG |
| | CAAAGCCTGGGCCTACTTCTCCGATGTGGATCTGGAAAAGGACGTGCACAGCGGGCTCATCGGACCACTGCTTGTGTGCCACACCAACACACTGAACC |
| | CCGCTCACGGCAGACAAGTGACAGTGCAAGAGTTCGCCCTGTTCTTCACCATCTTCGACGAAACAAAGAGCTGGTACTTCACCGAGAATATGGAACGG |
| | AACTGCAGGGCCCCTTGCAACATCCAGATGGAAGATCCCACCTTCAAAGAGAACTACCGGTTCCACGCCATCAACGGCTACATCATGGACACACTGCC |
| | CGGCCTGGTTATGGCCCAGGATCAGAGAATCCGGTGGTATCTGCTGTCCATGGGCTCCAACGAGAATATCCACAGCATCCACTTCAGCGGCCACGTGT |
| | TCACCGTGCGGAAAAAAGAAGAGTACAAAATGGCCCTGTACAATCTGTACCCTGGGGTGTTCGAAACCGTGGAAATGCTGCCTTCCAAGGCCGGCATT |
| | TGGAGAGTGGAATGTCTGATTGGAGAGCACCTCCACGCCGGAATGAGCACCCTGTTTCTGGTGTACTCCAACAAGTGTCAGACCCCTCTCGGCATGGC |
| | CTCTGGACACATCAGAGACTTCCAGATCACCGCCTCTGGCCAGTACGGACAGTGGGCTCCTAAACTGGCTCGGCTGCACTACTCCGGCAGCATCAATG |
| | CCTGGTCCACCAAAGAGCCCTTCAGCTGGATCAAGGTGGACCTGCTGGCTCCCATGATCATCCACGGAATCAAGACCCAGGGCGCAAGACAGAAGTTC |
| | AGCAGCCTGTACATCAGCCAGTTCATCATCATGTACAGCCTGGACGGAAAGAAGTGGCAGACCTACCGGGGCAATAGCACCGGCACACTCATGGTGTT |
| | CTTCGGCAACGTGGACTCCAGCGGCATTAAGCACAACATCTTCAACCCTCCAATCATTGCCCGGTACATCCGGCTGCACCCCACACACTACAGCATCC |
| | GGTCTACCCTGAGAATGGAACTGATGGGCTGCGACCTGAACAGCTGCTCTATGCCCCTCGGAATGGAAAGCAAGGCCATCAGCGACGCCCAGATCACA |
| | GCCAGCAGCTACTTCACCAACATGTTCGCCACTTGGAGCCCCTCCAAGGCTAGACTGCATCTGCAGGGCAGAAGCAACGCTTGGAGGCCCCAAGTGAA |
| | CAACCCCAAAGAGTGGCTGCAGGTTGACTTTCAAAAGACCATGAAAGTGACCGGCGTGACCACACAGGGCGTCAAGTCTCTGCTGACCTCTATGTACG |
| | TGAAAGAGTTCCTGATTAGCAGCAGCCAGGACGGCCACCAGTGGACCCTGTTTTTCCAGAACGGCAAAGTGAAAGTGTTCCAGGGCAATCAGGACAGC |
| | TTCACACCCGTGGTCAATTCTCTGGACCCTCCACTGCTGACCAGATACCTGCGGATTCACCCTCAGTCTTGGGTGCACCAGATCGCTCTGCGGATGGA |
| | AGTGCTGGGCTGTGAAGCTCAGGACCTCTACTAGTTAATTAAGAGCATCTTACCGCCATTTATTCCCATATTTGTTCTGTTTTTCTTGATTTGGGTAT |
| | ACATTTAAATGTTAATAAAACAAAATGGTGGGGCAATCATTTACATTTTTAGGGATATGTAATTACTAGTTCAGGTGTATTGCCACAAGACAAACATG |
| | TTAAGAAACTTTCCCGTTATTTACGCTCTGTTCCTGTTAATCAACCTCTGGATTACAAAATTTGTGAAAGATTGACTGATATTCTTAACTATGTTGCT |
| | CCTTTTACGCTGTGTGGATATGCTGCTTTATAGCCTCTGTATCTAGCTATTGCTTCCCGTACGGCTTTCGTTTTCTCCTCCTTGTATAAATCCTGGTT |
| | GCTGTCTCTTTTAGAGGAGTTGTGGCCCGTTGTCCGTCAACGTGGCGTGGTGTGCTCTGTGTTTGCTGACGCAACCCCCACTGGCTGGGGCATTGCCA |
| | CCACCTGTCAACTCCTTTCTGGGACTTTCGCTTTCCCCCTCCCGATCGCCACGGCAGAACTCATCGCCGCCTGCCTTGCCCGCTGCTGGACAGGGGCT |
| | AGGTTGCTGGGCACTGATAATTCCGTGGTGTTGTCTGTGCCTTCTAGTTGCCAGCCATCTGTTGTTTGCCCCTCCCCCGTGCCTTCCTTGACCCTGGA |
| | AGGTGCCACTCCCACTGTCCTTTCCTAATAAAATGAGGAAATTGCATCGCATTGTCTGAGTAGGTGTCATTCTATTCTGGGGGGTGGGGTGGGGCAGG |
| | ACAGCAAGGGGGAGGATTGGGAAGACAATAGCAGGCATGCTGGGGATGCGGTGGGCTCTATGGCTCTAGAGCATGGCTACGTAGATAAGTAGCATGGC |
| | GGGTTAATCATTAACTACACCTGCAGGAGGAACCCCTAGTGATGGAGTTGGCCACTCCCTCTCTGCGCGCTCGCTCGCTCACTGAGGCCGGGCGACCA |
| | AAGGTCGCCCGACGCCCGGGCGGCCTCAGTGAGCGAGCGAGCGCGCAGCTGCCTGCAGGGGCGCGCCTCGAGGCATGCGGTACCAAGCTTGTCGAGAA |
| | GTACTAGAGGATCATAATCAGCCATACCACATTTGTAGAGGTTTTACTTGCTTTAAAAAACCTCCCACACCTCCCCCTGAACCTGAAACATAAAATGA |
| | ATGCAATTGTTGTTGTTAACTTGTTTATTGCAGCTTATAATGGTTACAAATAAAGCAATAGCATCACAAATTTCACAAATAAAGCATTTTTTTCACTG |
| | CATTCTAGTTGTGGTTTGTCCAAACTCATCAATGTATCTTATCATGTCTGGATCTGATCACTGATATCGCCTAGGAGATCCGAACCAGATAAGTGAAA |
| | TCTAGTTCCAAACTATTTTGTCATTTTTAATTTTCGTATTAGCTTACGACGCTACACCCAGTTCCCATCTATTTTGTCACTCTTCCCTAAATAATCCT |
| | TAAAAACTCCATTTCCACCCCTCCCAGTTCCCAACTATTTTGTCCGCCCACAGCGGGGCATTTTTCTTCCTGTTATGTTTTTAATCAAACATCCTGCC |
| | AACTCCATGTGACAAACCGTCATCTTCGGCTACTTTTTCTCTGTCACAGAATGAAAATTTTTCTGTCATCTCTTCGTTATTAATGTTTGTAATTGACT |
| | GAATATCAACGCTTATTTGCAGCCTGAATGGCGAATGG |
| ceDNAFVIII- | AAAGTAGCCGAAGATGACGGTTTGTCACATGGAGTTGGCAGGATGTTTGATTAAAAACATAACAGGAAGAAAAATGCCCCGCTGTGGGCGGACAAAAT |
| vector 9 | AGTTGGGAACTGGGAGGGGTGGAAATGGAGTTTTTAAGGATTATTTAGGGAAGAGTGACAAAATAGATGGGAACTGGGTGTAGCGTCGTAAGCTAATA |
| (SEQ ID NO: | CGAAAATTAAAAATGACAAAATAGTTTGGAACTAGATTTCACTTATCTGGTTCGGATCTCCTAGGCCTGCAGGCAGCTGCGCGCTCGCTCGCTCACTG |
| 200) | AGGCCGCCCGGGCAAAGCCCGGGCGTCGGGCGACCTTTGGTCGCCCGGCCTCAGTGAGCGAGCGAGCGCGCAGAGAGGGAGTGGCCAACTCCATCACT |
| | AGGGGTTCCTTGTAGTTAATGATTAACCCGCCATGCTACTTATCGCGGCCGCTCAATATTGGCCATTAGCCATATTATTCATTGGTTATATAGCATAA |
| | ATCAATATTGGCTATTGGCCATTGCATACGTTGTATCTATATCATAATATGTACATTTATATTGGCTCATGTCCAATATGACCGCCATGTTGGCATTG |
| | ATTATTGACTAGTTATTAATAGTAATCAATTACGGGGTCATTAGTTCATAGCCCATATATGGAGTTCCGCGTTACATAACTTACGGTAAATGGCCCGC |
| | CTGGCTGACCGCCCAACGACCCCCGCCCATTGACGTCAATAATGACGTATGTTCCCATAGTAACGCCAATAGGGACTTTCCATTGACGTCAATGGGTG |
| | GAGTATTTACGGTAAACTGCCCACTTGGCAGTACATCAAGTGTATCATATGCCAAGTCCGCCCCCTATTGACGTCAATGACGGTAAATGGCCCGCCTG |
| | GCATTATGCCCAGTACATGACCTTACGGGACTTTCCTACTTGGCAGTACATCTACGTATTAGTCATCGCTATTACCATGGTCGAGGTGAGCCCCACGT |
| | TCTGCTTCACTCTCCCCATCTCCCCCCCCTCCCCACCCCCAATTTTGTATTTATTTATTTTTTAATTATTTTGTGCAGCGATGGGGGCGGGGGGGGGG |
| | GGGGGGCGCGCGCCAGGCGGGGCGGGGCGGGGCGAGGGGCGGGGCGGGGCGAGGCGGAGAGGTGCGGCGGCAGCCAATCAGAGCGGCGCGCTCCGAAA |
| | GTTTCCTTTTATGGCGAGGCGGCGGCGGCGGCGGCCCTATAAAAAGCGAAGCGCGCGGCGGGCGGGAGTCGCTGCGACGCTGCCTTCGCCCCGTGCCC |
| | CGCTCCGCCGCCGCCTCGCGCCGCCCGCCCCGGCTCTGACTGACCGCGTTACTCCCACAGGTGAGCGGGCGGGACGGCCCTTCTCCTCCGGGCTGTAA |
| | TTAGCGCTTGGTTTAATGACGGCTTGTTTCTTTTCTGTGGCTGCGTGAAAGCCTTGAGGGGCTCCGGGAGGGCCCTTTGTGCGGGGGGGAGCGGCTCG |
| | GGGGGTGCGTGCGTGTGTGTGTGCGTGGGGAGCGCCGCGTGCGGCCCGCGCTGCCCGGCGGCTGTGAGCGCTGCGGGCGCGGCGCGGGGCTTTGTGCG |
| | CTCCGCAGTGTGCGCGAGGGGAGCGCGGCCGGGGGCGGTGCCCCGCGGTGCGGGGGGGGCTGCGAGGGGAACAAAGGCTGCGTGCGGGGTGTGTGCGT |
| | GGGGGGGTGAGCAGGGGGTGTGGGCGCGGCGGTCGGGCTGTAACCCCCCCCTGCACCCCCCTCCCCGAGTTGCTGAGCACGGCCCGGCTTCGGGTGCG |
| | GGGCTCCGTACGGGGCGTGGCGCGGGGCTCGCCGTGCCGGGCGGGGGGTGGCGGCAGGTGGGGGTGCCGGGCGGGGCGGGGCCGCCTCGGGCCGGGGA |
| | GGGCTCGGGGGAGGGGCGCGGCGGCCCCCGGAGCGCCGGCGGCTGTCGAGGCGCGGCGAGCCGCAGCCATTGCCTTTTATGGTAATCGTGCGAGAGGG |
| | CGCAGGGACTTCCTTTGTCCCAAATCTGTGCGGAGCCGAAATCTGGGAGGCGCCGCCGCACCCCCTCTAGCGGGCGCGGGGCGAAGCGGTGCGGCGCC |
| | GGCAGGAAGGAAATGGGCGGGGAGGGCCTTCGTGCGTCGCCGCGCCGCCGTCCCCTTCTCCCTCTCCAGCCTCGGGGCTGTCCGCGGGGGGACGGCTG |
| | CCTTTCGGGGGGGACGGGGCAGGGCGGGGTTCGGCTTCTGGCGTGTGACCGGCGGCTCTAGAGCCTCTGCTAACCATGTTTTAGCCTTTCTTCTTTTT |
| | CCTACAGCTCCTGGGCAACGTGCTGGTTATTGTGCTGTCTCATCATTTGTCGACAGAATTCCTCGAAGATCCGAAGGGGTTCAAGCTTGGCATTCCGG |
| | TACTGTTGGTAAAGCCAGTTTAAACCGCAGCCACCATGCAGATCGAGCTGTCTACCTGCTTCTTCCTGTGCCTGCTGCGGTTCTGCTTCAGCGCCACC |
| | AGAAGATATTACCTGGGCGCCGTGGAACTGAGCTGGGACTACATGCAGTCTGACCTGGGAGAGCTGCCCGTGGACGCTAGATTTCCTCCAAGAGTGCC |
| | CAAGAGCTTCCCCTTCAACACCTCCGTGGTGTACAAGAAAACCCTGTTCGTGGAATTCACCGACCACCTGTTCAATATCGCCAAGCCTCGGCCTCCTT |
| | GGATGGGACTGCTGGGACCTACAATTCAGGCCGAGGTGTACGACACCGTGGTCATCACCCTGAAGAACATGGCCAGCCATCCTGTGTCTCTGCACGCC |
| | GTGGGAGTGTCTTATTGGAAGGCTTCTGAGGGCGCCGAGTACGACGATCAGACAAGCCAGAGAGAGAAAGAGGACGACAAGGTTTTCCCTGGCGGCAG |
| | CCACACCTATGTCTGGCAGGTCCTGAAAGAAAACGGCCCTATGGCCTCCGATCCTCTGTGCCTGACATACAGCTACCTGAGCCACGTGGACCTGGTCA |
| | AGGACCTGAATTCTGGCCTGATCGGAGCCCTGCTCGTGTGTAGAGAAGGCAGCCTGGCCAAAGAGAAAACCCAGACACTGCACAAGTTCATCCTGCTG |
| | TTCGCCGTGTTCGACGAGGGCAAGAGCTGGCACAGCGAGACAAAGAACAGCCTGATGCAGGACAGGGATGCCGCCTCTGCTAGAGCTTGGCCTAAGAT |
| | GCACACCGTGAACGGCTACGTGAACAGAAGCCTGCCTGGACTGATCGGCTGCCACAGAAAGTCCGTGTACTGGCACGTGATCGGCATGGGCACAACAC |
| | CTGAGGTGCACAGCATCTTTCTGGAAGGCCACACCTTCCTCGTGCGGAACCACAGACAGGCCAGCCTGGAAATCAGCCCTATCACCTTCCTGACCGCT |
| | CAGACCCTGCTGATGGATCTGGGCCAGTTTCTGCTGTTCTGCCACATCAGCTCCCACCAGCACGATGGCATGGAAGCCTACGTGAAGGTGGACAGCTG |
| | CCCCGAAGAACCCCAGCTGCGGATGAAGAACAACGAGGAAGCCGAGGACTACGACGACGACCTGACCGACTCTGAGATGGACGTCGTCAGATTCGACG |
| | ACGATAACAGCCCCAGCTTCATCCAGATCAGAAGCGTGGCCAAGAAGCACCCCAAGACCTGGGTGCACTATATCGCCGCCGAGGAAGAGGACTGGGAT |
| | TACGCTCCTCTGGTGCTGGCCCCTGACGACAGAAGCTACAAGAGCCAGTACCTGAACAACGGCCCTCAGCGGATCGGCCGGAAGTATAAGAAAGTGCG |
| | GTTCATGGCCTACACCGACGAGACATTCAAGACCAGAGAGGCCATCCAGCACGAGAGCGGAATTCTGGGCCCTCTGCTGTATGGCGAAGTGGGCGATA |
| | CACTGCTGATCATCTTCAAGAACCAGGCCAGCAGACCCTACAACATCTACCCTCACGGCATCACCGATGTGCGGCCCCTGTATTCTAGAAGGCTGCCC |
| | AAGGGCGTGAAGCACCTGAAGGACTTCCCTATCCTGCCTGGCGAGATTTTCAAGTACAAGTGGACCGTGACCGTGGAAGATGGCCCCACCAAGAGCGA |
| | CCCTAGATGTCTGACACGGTACTACAGCAGCTTCGTGAACATGGAACGCGACCTGGCCAGCGGCCTGATTGGACCTCTGCTGATCTGCTACAAAGAAA |
| | GCGTGGACCAGCGGGGCAACCAGATCATGAGCGACAAGCGGAACGTGATCCTGTTTAGCGTGTTCGATGAGAACCGGTCCTGGTATCTGACCGAGAAC |
| | ATCCAGCGGTTTCTGCCCAATCCTGCCGGGGTGCAACTGGAAGATCCTGAGTTCCAGGCAAGCAACATCATGCACTCCATCAATGGCTATGTGTTCGA |
| | CAGCCTGCAGCTGAGCGTGTGCCTGCACGAAGTGGCCTACTGGTACATCCTGAGCATTGGCGCCCAGACCGACTTCCTGTCCGTGTTCTTTAGCGGCT |
| | ACACCTTCAAGCACAAGATGGTGTACGAGGATACCCTGACACTGTTCCCATTCAGCGGCGAGACAGTGTTCATGAGCATGGAAAACCCCGGCCTGTGG |
| | ATTCTGGGCTGTCACAACAGCGACTTCCGGAACAGAGGCATGACAGCCCTGCTGAAGGTGTCCAGCTGCGACAAGAACACCGGCGACTACTACGAGGA |
| | CAGCTATGAGGACATCAGCGCCTACCTGCTGAGCAAGAACAATGCCATCGAGCCTCGGAGCTTCAGCCAGAATCCTCCTGTGCTGAAGCGGCACCAGC |
| | GCGAGATCACCAGAACAACCCTGCAGAGCGACCAAGAGGAAATCGATTACGACGACACCATCAGCGTCGAGATGAAGAAAGAAGATTTCGACATCTAC |
| | GACGAGGACGAGAATCAGAGCCCCAGAAGCTTTCAGAAAAAGACCCGGCACTACTTCATTGCCGCCGTCGAGAGACTGTGGGACTACGGCATGTCTAG |
| | CAGCCCTCACGTGCTGAGAAATAGAGCCCAGAGCGGCAGCGTGCCCCAGTTCAAGAAAGTGGTGTTCCAAGAGTTCACCGACGGCAGCTTCACCCAGC |
| | CACTGTATAGAGGCGAGCTGAACGAGCATCTGGGCCTGCTGGGCCCTTATATCAGAGCCGAAGTGGAAGATAACATCATGGTCACCTTCCGGAATCAG |
| | GCTAGCCGGCCTTACAGCTTCTACAGCTCCCTGATCAGCTACGAAGAGGACCAGAGACAGGGCGCTGAGCCCAGAAAGAACTTCGTGAAGCCCAACGA |
| | GACTAAGACCTACTTTTGGAAGGTGCAGCACCACATGGCCCCTACAAAGGACGAGTTCGACTGCAAAGCCTGGGCCTACTTCTCCGATGTGGATCTGG |
| | AAAAGGACGTGCACAGCGGGCTCATCGGACCACTGCTTGTGTGCCACACCAACACACTGAACCCCGCTCACGGCAGACAAGTGACAGTGCAAGAGTTC |
| | GCCCTGTTCTTCACCATCTTCGACGAAACAAAGAGCTGGTACTTCACCGAGAATATGGAACGGAACTGCAGAGCCCCTTGCAACATCCAGATGGAAGA |
| | TCCCACCTTCAAAGAGAACTACCGGTTCCACGCCATCAACGGCTACATCATGGACACACTGCCCGGCCTGGTTATGGCCCAGGATCAGAGAATCCGGT |
| | GGTATCTGCTGTCCATGGGCTCCAACGAGAATATCCACAGCATCCACTTCAGCGGCCACGTGTTCACCGTGCGGAAAAAAGAAGAGTACAAAATGGCC |
| | CTGTACAATCTGTACCCTGGGGTGTTCGAAACCGTGGAAATGCTGCCTTCCAAGGCCGGCATTTGGAGAGTGGAATGTCTGATTGGAGAGCACCTCCA |
| | CGCCGGAATGAGCACCCTGTTTCTGGTGTACAGCAACAAGTGTCAGACCCCTCTCGGCATGGCCTCTGGACACATCAGAGACTTCCAGATCACCGCCT |
| | CTGGCCAGTACGGACAGTGGGCTCCTAAACTGGCTCGGCTGCACTACAGCGGCAGCATCAATGCCTGGTCCACCAAAGAGCCCTTCAGCTGGATCAAG |
| | GTGGACCTGCTGGCTCCCATGATCATCCACGGAATCAAGACCCAGGGCGCCAGACAGAAGTTCAGCAGCCTGTACATCAGCCAGTTCATCATCATGTA |
| | CAGCCTGGACGGCAAGAAGTGGCAGACCTACAGAGGCAACAGCACCGGCACACTCATGGTGTTCTTCGGCAACGTGGACTCCAGCGGCATTAAGCACA |
| | ACATCTTCAACCCTCCAATCATTGCCCGGTACATCCGGCTGCACCCCACACACTACAGCATCCGGTCTACCCTGAGAATGGAACTGATGGGCTGCGAC |
| | CTGAACAGCTGCTCTATGCCCCTCGGAATGGAAAGCAAGGCCATCAGCGACGCCCAGATCACAGCCAGCAGCTACTTCACCAACATGTTCGCCACTTG |
| | GAGCCCCTCCAAGGCTAGACTGCATCTGCAGGGCAGAAGCAACGCTTGGAGGCCCCAAGTGAACAACCCCAAAGAGTGGCTGCAGGTTGACTTTCAAA |
| | AGACCATGAAAGTGACCGGCGTGACCACACAGGGCGTCAAGTCTCTGCTGACCTCTATGTACGTGAAAGAGTTCCTGATCTCCAGCAGCCAGGACGGC |
| | CATCAGTGGACCCTGTTTTTCCAGAACGGCAAAGTGAAAGTGTTCCAGGGCAATCAGGACAGCTTCACACCCGTGGTCAATTCTCTGGACCCTCCACT |
| | GCTGACCAGATACCTGCGGATTCACCCTCAGTCTTGGGTGCACCAGATCGCTCTGCGGATGGAAGTGCTGGGCTGTGAAGCTCAGGACCTCTACTAGT |
| | TAATTAAGAGCATCTTACCGCCATTTATTCCCATATTTGTTCTGTTTTTCTTGATTTGGGTATACATTTAAATGTTAATAAAACAAAATGGTGGGGCA |
| | ATCATTTACATTTTTAGGGATATGTAATTACTAGTTCAGGTGTATTGCCACAAGACAAACATGTTAAGAAACTTTCCCGTTATTTACGCTCTGTTCCT |
| | GTTAATCAACCTCTGGATTACAAAATTTGTGAAAGATTGACTGATATTCTTAACTATGTTGCTCCTTTTACGCTGTGTGGATATGCTGCTTTATAGCC |
| | TCTGTATCTAGCTATTGCTTCCCGTACGGCTTTCGTTTTCTCCTCCTTGTATAAATCCTGGTTGCTGTCTCTTTTAGAGGAGTTGTGGCCCGTTGTCC |
| | GTCAACGTGGCGTGGTGTGCTCTGTGTTTGCTGACGCAACCCCCACTGGCTGGGGCATTGCCACCACCTGTCAACTCCTTTCTGGGACTTTCGCTTTC |
| | CCCCTCCCGATCGCCACGGCAGAACTCATCGCCGCCTGCCTTGCCCGCTGCTGGACAGGGGCTAGGTTGCTGGGCACTGATAATTCCGTGGTGTTGTC |
| | ATCGATTCCATAAAGTAGGAAACACTACACGATTCCATAAAGTAGGAAACACTACATCACTCCATAAAGTAGGAAACACTACAGTTAACTGTGCCTTC |
| | TAGTTGCCAGCCATCTGTTGTTTGCCCCTCCCCCGTGCCTTCCTTGACCCTGGAAGGTGCCACTCCCACTGTCCTTTCCTAATAAAATGAGGAAATTG |
| | CATCGCATTGTCTGAGTAGGTGTCATTCTATTCTGGGGGGTGGGGTGGGGCAGGACAGCAAGGGGGAGGATTGGGAAGACAATAGCAGGCATGCTGGG |
| | GATGCGGTGGGCTCTATGGCGGCGCGCCGCATGGCTACGTAGATAAGTAGCATGGCGGGTTAATCATTAACTACACCTGCAGGAGGAACCCCTAGTGA |
| | TGGAGTTGGCCACTCCCTCTCTGCGCGCTCGCTCGCTCACTGAGGCCGGGCGACCAAAGGTCGCCCGACGCCCGGGCGGCCTCAGTGAGCGAGCGAGC |
| | GCGCAGCTGCCTGCAGGTCGACGCTAGCAGCTGATGCATAGCATGCGGTACCGGGAGATGGGGGAGGCTAACTGAAACACGGAAGGAGACAATACCGG |
| | AAGGAACCCGCGCTATGACGGCAATAAAAAGACAGAATAAAACGCACGGGTGTTGGGTCGTTTGTTCATAAACGCGGGGTTCGGTCCCAGGGCTGGCA |
| | CTCTGTCGATACCCCACCGAGACCCCATTGGGACCAATACGCCCGCGTTTCTTCCTTTTCCCCACCCCAACCCCCAAGTTCGGGTGAAGGCCCAGGGC |
| | TCGCAGCCAACGTCGGGGCGGCAAGCCCTGCCATAGCCACTACGGGTACGTAGGCCAACCACTAGAACTATAGCTAGAGTCCTGGGCGAACAAACGAT |
| | GCTCGCCTTCCAGAAAACCGAGGATGCGAACCACTTCATCCGGGGTCAGCACCACCGGCAAGCGCCGCGACGGCCGAGGTCTACCGATCTCCTGAAGC |
| | CAGGGCAGATCCGTGCACAGCACCTTGCCGTAGAAGAACAGCAAGGCCGCCAATGCCTGACGATGCGTGGAGACCGAAACCTTGCGCTCGTTCGCCAG |
| | CCAGGACAGAAATGCCTCGACTTCGCTGCTGCCCAAGGTTGCCGGGTGACGCACACCGTGGAAACGGATGAAGGCACGAACCCAGTTGACATAAGCCT |
| | GTTCGGTTCGTAAACTGTAATGCAAGTAGCGTATGCGCTCACGCAACTGGTCCAGAACCTTGACCGAACGCAGCGGTGGTAACGGCGCAGTGGCGGTT |
| | TTCATGGCTTGTTATGACTGTTTTTTTGTACAGTCTATGCCTCGGGCATCCAAGCAGCAAGCGCGTTACGCCGTGGGTCGATGTTTGATGTTATGGAG |
| | CAGCAACGATGTTACGCAGCAGCAACGATGTTACGCAGCAGGGCAGTCGCCCTAAAACAAAGTTAGGTGGCTCAAGTATGGGCATCATTCGCACATGT |
| | AGGCTCGGCCCTGACCAAGTCAAATCCATGCGGGCTGCTCTTGATCTTTTCGGTCGTGAGTTCGGAGACGTAGCCACCTACTCCCAACATCAGCCGGA |
| | CTCCGATTACCTCGGGAACTTGCTCCGTAGTAAGACATTCATCGCGCTTGCTGCCTTCGACCAAGAAGCGGTTGTTGGCGCTCTCGCGGCTTACGTTC |
| | TGCCCAGGTTTGAGCAGCCGCGTAGTGAGATCTATATCTATGATCTCGCAGTCTCCGGCGAGCACCGGAGGCAGGGCATTGCCACCGCGCTCATCAAT |
| | CTCCTCAAGCATGAGGCCAACGCGCTTGGTGCTTATGTGATCTACGTGCAAGCAGATTACGGTGACGATCCCGCAGTGGCTCTCTATACAAAGTTGGG |
| | CATACGGGAAGAAGTGATGCACTTTGATATCGACCCAAGTACCGCCACCTAACAATTCGTTCAAGCCGAGATCGGCTTCCCGGCCGCGGAGTTGTTCG |
| | GTAAATTGTCACAACGCCGCGAATATAGTCTTTACCATGCCCTTGGCCACGCCCCTCTTTAATACGACGGGCAATTTGCACTTCAGAAAATGAAGAGT |
| | TTGCTTTAGCCATAACAAAAGTCCAGTATGCTTTTTCACAGCATAACTGGACTGATTTCAGTTTACAACTATTCTGTCTAGTTTAAGACTTTATTGTC |
| | ATAGTTTAGATCTATTTTGTTCAGTTTAAGACTTTATTGTCCGCCCACACCCGCTTACGCAGGGCATCCATTTATTACTCAACCGTAACCGATTTTGC |
| | CAGGTTACGCGGCTGGTCTGCGGTGTGAAATACCGCACAGATGCGTAAGGAGAAAATACCGCATCAGGCGCTCTTCCGCTTCCTCGCTCACTGACTCG |
| | CTGCGCTCGGTCGTTCGGCTGCGGCGAGCGGTATCAGCTCACTCAAAGGCGGTAATACGGTTATCCACAGAATCAGGGGATAACGCAGGAAAGAACAT |
| | GTGAGCAAAAGGCCAGCAAAAGGCCAGGAACCGTAAAAAGGCCGCGTTGCTGGCGTTTTTCCATAGGCTCCGCCCCCCTGACGAGCATCACAAAAATC |
| | GACGCTCAAGTCAGAGGTGGCGAAACCCGACAGGACTATAAAGATACCAGGCGTTTCCCCCTGGAAGCTCCCTCGTGCGCTCTCCTGTTCCGACCCTG |
| | CCGCTTACCGGATACCTGTCCGCCTTTCTCCCTTCGGGAAGCGTGGCGCTTTCTCAATGCTCACGCTGTAGGTATCTCAGTTCGGTGTAGGTCGTTCG |
| | CTCCAAGCTGGGCTGTGTGCACGAACCCCCCGTTCAGCCCGACCGCTGCGCCTTATCCGGTAACTATCGTCTTGAGTCCAACCCGGTAAGACACGACT |
| | TATCGCCACTGGCAGCAGCCACTGGTAACAGGATTAGCAGAGCGAGGTATGTAGGCGGTGCTACAGAGTTCTTGAAGTGGTGGCCTAACTACGGCTAC |
| | ACTAGAAGGACAGTATTTGGTATCTGCGCTCTGCTGAAGCCAGTTACCTTCGGAAAAAGAGTTGGTAGCTCTTGATCCGGCAAACAAACCACCGCTGG |
| | TAGCGGTGGTTTTTTTGTTTGCAAGCAGCAGATTACGCGCAGAAAAAAAGGATCTCAAGAAGATCCTTTGATCTTTTCTACGGGGTCTGACGCTCAGT |
| | GGAACGAAAACTCACGTTAAGGGATTTTGGTCATGAGATTATCAAAAAGGATCTTCACCTAGATCCTTTTAAATTAAAAATGAAGTTTTAAATCAATC |
| | TAAAGTATATATGAGTAAACTTGGTCTGACAGTTACCAATGCTTAATCAGTGAGGCACCTATCTCAGCGATCTGTCTATTTCGTTCATCCATAGTTGC |
| | CTGACTCCCCGTCGTGTAGATAACTACGATACGGGAGGGCTTACCATCTGGCCCCAGTGCTGCAATGATACCGCGAGACCCACGCTCACCGGCTCCAG |
| | ATTTATCAGCAATAAACCAGCCAGCCGGAAGGGCCGAGCGCAGAAGTGGTCCTGCAACTTTATCCGCCTCCATCCAGTCTATTAATTGTTGCCGGGAA |
| | GCTAGAGTAAGTAGTTCGCCAGTTAATAGTTTGCGCAACGTTGTTGCCATTGCTACAGGCATCGTGGTGTCACGCTCGTCGTTTGGTATGGCTTCATT |
| | CAGCTCCGGTTCCCAACGATCAAGGCGAGTTACATGATCCCCCATGTTGTGCAAAAAAGCGGTTAGCTCCTTCGGTCCTCCGATCGTTGTCAGAAGTA |
| | AGTTGGCCGCAGTGTTATCACTCATGGTTATGGCAGCACTGCATAATTCTCTTACTGTCATGCCATCCGTAAGATGCTTTTCTGTGACTGGTGAGTAC |
| | TCAACCAAGTCATTCTGAGAATAGTGTATGCGGCGACCGAGTTGCTCTTGCCCGGCGTCAATACGGGATAATACCGCGCCACATAGCAGAACTTTAAA |
| | AGTGCTCATCATTGGAAAACGTTCTTCGGGGCGAAAACTCTCAAGGATCTTACCGCTGTTGAGATCCAGTTCGATGTAACCCACTCGTGCACCCAACT |
| | GATCTTCAGCATCTTTTACTTTCACCAGCGTTTCTGGGTGAGCAAAAACAGGAAGGCAAAATGCCGCAAAAAAGGGAATAAGGGCGACACGGAAATGT |
| | TGAATACTCATACTCTTCCTTTTTCAATATTATTGAAGCATTTATCAGGGTTATTGTCTCATGAGCGGATACATATTTGAATGTATTTAGAAAAATAA |
| | ACAAATAGGGGTTCCGCGCACATTTCCCCGAAAAGTGCCACCTGAAATTGTAAACGTTAATATTTTGTTAAAATTCGCGTTAAATTTTTGTTAAATCA |
| | GCTCATTTTTTAACCAATAGGCCGAAATCGGCAAAATCCCTTATAAATCAAAAGAATAGACCGAGATAGGGTTGAGTGTTGTTCCAGTTTGGAACAAG |
| | AGTCCACTATTAAAGAACGTGGACTCCAACGTCAAAGGGCGAAAAACCGTCTATCAGGGCGATGGCCCACTACGTGAACCATCACCCTAATCAAGTTT |
| | TTTGGGGTCGAGGTGCCGTAAAGCACTAAATCGGAACCCTAAAGGGAGCCCCCGATTTAGAGCTTGACGGGGAAAGCCGGCGAACGTGGCGAGAAAGG |
| | AAGGGAAGAAAGCGAAAGGAGCGGGCGCTAGGGCGCTGGCAAGTGTAGCGGTCACGCTGCGCGTAACCACCACACCCGCCGCGCTTAATGCGCCGCTA |
| | CAGGGCGCGTCCCATTCGCCATTCAGGCTGCAAATAAGCGTTGATATTCAGTCAATTACAAACATTAATAACGAAGAGATGACAGAAAAATTTTCATT |
| | CTGTGACAGAGAA |
| ceDNAFVIII- | AAAGTAGCCGAAGATGACGGTTTGTCACATGGAGTTGGCAGGATGTTTGATTAAAAACATAACAGGAAGAAAAATGCCCCGCTGTGGGCGGACAAAAT |
| vector 10 | AGTTGGGAACTGGGAGGGGTGGAAATGGAGTTTTTAAGGATTATTTAGGGAAGAGTGACAAAATAGATGGGAACTGGGTGTAGCGTCGTAAGCTAATA |
| (SEQ ID NO: | CGAAAATTAAAAATGACAAAATAGTTTGGAACTAGATTTCACTTATCTGGTTCGGATCTCCTAGGCCTGCAGGCAGCTGCGCGCTCGCTCGCTCACTG |
| 201) | AGGCCGCCCGGGCAAAGCCCGGGCGTCGGGCGACCTTTGGTCGCCCGGCCTCAGTGAGCGAGCGAGCGCGCAGAGAGGGAGTGGCCAACTCCATCACT |
| | AGGGGTTCCTTGTAGTTAATGATTAACCCGCCATGCTACTTATCGCGGCCGCAGGCTCAGAGGCACACAGGAGTTTCTGGGCTCACCCTGCCCCCTTC |
| | CAACCCCTCAGTTCCCATCCTCCAGCAGCTGTTTGTGTGCTGCCTCTGAAGTCCACACTGAACAAACTTCAGCCTACTCATGTCCCTAAAATGGGCAA |
| | ACATTGCAAGCAGCAAACAGCAAACACACAGCCCTCCCTGCCTGCTGACCTTGGAGCTGGGGCAGAGGTCAGAGACCTCTCTGGGCCCATGCCACCTC |
| | CAACATCCACTCGACCCCTTGGAATTTCGGTGGAGAGGAGCAGAGGTTGTCCTGGCGTGGTTTAGGTAGTGTGAGAGGGTCCGGGTTCAAAACCACTT |
| | GCTGGGTGGGGAGTCGTCAGTAAGTGGCTATGCCCCGACCCCGAAGCCTGTTTCCCCATCTGTACAATGGAAATGATAAAGACGCCCATCTGATAGGG |
| | TTTTTGTGGCAAATAAACATTTGGTTTTTTTGTTTTGTTTTGTTTTGTTTTTTGAGATGGAGGTTTGCTCTGTCGCCCAGGCTGGAGTGCAGTGACAC |
| | AATCTCATCTCACCACAACCTTCCCCTGCCTCAGCCTCCCAAGTAGCTGGGATTACAAGCATGTGCCACCACACCTGGCTAATTTTCTATTTTTAGTA |
| | GAGACGGGTTTCTCCATGTTGGTCAGCCTCAGCCTCCCAAGTAACTGGGATTACAGGCCTGTGCCACCACACCCGGCTAATTTTTTCTATTTTTGACA |
| | GGGACGGGGTTTCACCATGTTGGTCAGGCTGGTCTAGAGGTACCGGATCTTGCTACCAGTGGAACAGCCACTAAGGATTCTGCAGTGAGAGCAGAGGG |
| | CCAGCTAAGTGGTACTCTCCCAGAGACTGTCTGACTCACGCCACCCCCTCCACCTTGGACACAGGACGCTGTGGTTTCTGAGCCAGGTACAATGACTC |
| | CTTTCGGTAAGTGCAGTGGAAGCTGTACACTGCCCAGGCAAAGCGTCCGGGCAGCGTAGGCGGGCGACTCAGATCCCAGCCAGTGGACTTAGCCCCTG |
| | TTTGCTCCTCCGATAACTGGGGTGACCTTGGTTAATATTCACCAGCAGCCTCCCCCGTTGCCCCTCTGGATCCACTGCTTAAATACGGACGAGGACAG |
| | GGCCCTGTCTCCTCAGCTTCAGGCACCACCACTGACCTGGGACAGTGAATCCGGACTCTAAGGTAAATATAAAATTTTTAAGTGTATAATGTGTTAAA |
| | CTACTGATTCTAATTGTTTCTCTCTTTTAGATTCCAACCTTTGGAACTGAGTTTAAACCGCAGCCACCATGCAGATCGAGCTGTCTACCTGCTTCTTC |
| | CTGTGCCTGCTGCGGTTCTGCTTCAGCGCCACCAGAAGATATTACCTGGGCGCCGTGGAACTGAGCTGGGACTACATGCAGTCTGACCTGGGAGAGCT |
| | GCCCGTGGACGCTAGATTTCCTCCAAGAGTGCCCAAGAGCTTCCCCTTCAACACCTCCGTGGTGTACAAGAAAACCCTGTTCGTGGAATTCACCGACC |
| | ACCTGTTCAATATCGCCAAGCCTCGGCCTCCTTGGATGGGACTGCTGGGACCTACAATTCAGGCCGAGGTGTACGACACCGTGGTCATCACCCTGAAG |
| | AACATGGCCAGCCATCCTGTGTCTCTGCACGCCGTGGGAGTGTCTTATTGGAAGGCTTCTGAGGGCGCCGAGTACGACGATCAGACAAGCCAGAGAGA |
| | GAAAGAGGACGACAAGGTTTTCCCTGGCGGCAGCCACACCTATGTCTGGCAGGTCCTGAAAGAAAACGGCCCTATGGCCTCCGATCCTCTGTGCCTGA |
| | CATACAGCTACCTGAGCCACGTGGACCTGGTCAAGGACCTGAATTCTGGCCTGATCGGAGCCCTGCTCGTGTGTAGAGAAGGCAGCCTGGCCAAAGAG |
| | AAAACCCAGACACTGCACAAGTTCATCCTGCTGTTCGCCGTGTTCGACGAGGGCAAGAGCTGGCACAGCGAGACAAAGAACAGCCTGATGCAGGACAG |
| | GGATGCCGCCTCTGCTAGAGCTTGGCCTAAGATGCACACCGTGAACGGCTACGTGAACAGAAGCCTGCCTGGACTGATCGGCTGCCACAGAAAGTCCG |
| | TGTACTGGCACGTGATCGGCATGGGCACAACACCTGAGGTGCACAGCATCTTTCTGGAAGGCCACACCTTCCTCGTGCGGAACCACAGACAGGCCAGC |
| | CTGGAAATCAGCCCTATCACCTTCCTGACCGCTCAGACCCTGCTGATGGATCTGGGCCAGTTTCTGCTGTTCTGCCACATCAGCTCCCACCAGCACGA |
| | TGGCATGGAAGCCTACGTGAAGGTGGACAGCTGCCCCGAAGAACCCCAGCTGCGGATGAAGAACAACGAGGAAGCCGAGGACTACGACGACGACCTGA |
| | CCGACTCTGAGATGGACGTCGTCAGATTCGACGACGATAACAGCCCCAGCTTCATCCAGATCAGAAGCGTGGCCAAGAAGCACCCCAAGACCTGGGTG |
| | CACTATATCGCCGCCGAGGAAGAGGACTGGGATTACGCTCCTCTGGTGCTGGCCCCTGACGACAGAAGCTACAAGAGCCAGTACCTGAACAACGGCCC |
| | TCAGCGGATCGGCCGGAAGTATAAGAAAGTGCGGTTCATGGCCTACACCGACGAGACATTCAAGACCAGAGAGGCCATCCAGCACGAGAGCGGAATTC |
| | TGGGCCCTCTGCTGTATGGCGAAGTGGGCGATACACTGCTGATCATCTTCAAGAACCAGGCCAGCAGACCCTACAACATCTACCCTCACGGCATCACC |
| | GATGTGCGGCCCCTGTATTCTAGAAGGCTGCCCAAGGGCGTGAAGCACCTGAAGGACTTCCCTATCCTGCCTGGCGAGATTTTCAAGTACAAGTGGAC |
| | CGTGACCGTGGAAGATGGCCCCACCAAGAGCGACCCTAGATGTCTGACACGGTACTACAGCAGCTTCGTGAACATGGAACGCGACCTGGCCAGCGGCC |
| | TGATTGGACCTCTGCTGATCTGCTACAAAGAAAGCGTGGACCAGCGGGGCAACCAGATCATGAGCGACAAGCGGAACGTGATCCTGTTTAGCGTGTTC |
| | GATGAGAACCGGTCCTGGTATCTGACCGAGAACATCCAGCGGTTTCTGCCCAATCCTGCCGGGGTGCAACTGGAAGATCCTGAGTTCCAGGCAAGCAA |
| | CATCATGCACTCCATCAATGGCTATGTGTTCGACAGCCTGCAGCTGAGCGTGTGCCTGCACGAAGTGGCCTACTGGTACATCCTGAGCATTGGCGCCC |
| | AGACCGACTTCCTGTCCGTGTTCTTTAGCGGCTACACCTTCAAGCACAAGATGGTGTACGAGGATACCCTGACACTGTTCCCATTCAGCGGCGAGACA |
| | GTGTTCATGAGCATGGAAAACCCCGGCCTGTGGATTCTGGGCTGTCACAACAGCGACTTCCGGAACAGAGGCATGACAGCCCTGCTGAAGGTGTCCAG |
| | CTGCGACAAGAACACCGGCGACTACTACGAGGACAGCTATGAGGACATCAGCGCCTACCTGCTGAGCAAGAACAATGCCATCGAGCCTCGGAGCTTCA |
| | GCCAGAATCCTCCTGTGCTGAAGCGGCACCAGCGCGAGATCACCAGAACAACCCTGCAGAGCGACCAAGAGGAAATCGATTACGACGACACCATCAGC |
| | GTCGAGATGAAGAAAGAAGATTTCGACATCTACGACGAGGACGAGAATCAGAGCCCCAGAAGCTTTCAGAAAAAGACCCGGCACTACTTCATTGCCGC |
| | CGTCGAGAGACTGTGGGACTACGGCATGTCTAGCAGCCCTCACGTGCTGAGAAATAGAGCCCAGAGCGGCAGCGTGCCCCAGTTCAAGAAAGTGGTGT |
| | TCCAAGAGTTCACCGACGGCAGCTTCACCCAGCCACTGTATAGAGGCGAGCTGAACGAGCATCTGGGCCTGCTGGGCCCTTATATCAGAGCCGAAGTG |
| | GAAGATAACATCATGGTCACCTTCCGGAATCAGGCTAGCCGGCCTTACAGCTTCTACAGCTCCCTGATCAGCTACGAAGAGGACCAGAGACAGGGCGC |
| | TGAGCCCAGAAAGAACTTCGTGAAGCCCAACGAGACTAAGACCTACTTTTGGAAGGTGCAGCACCACATGGCCCCTACAAAGGACGAGTTCGACTGCA |
| | AAGCCTGGGCCTACTTCTCCGATGTGGATCTGGAAAAGGACGTGCACAGCGGGCTCATCGGACCACTGCTTGTGTGCCACACCAACACACTGAACCCC |
| | GCTCACGGCAGACAAGTGACAGTGCAAGAGTTCGCCCTGTTCTTCACCATCTTCGACGAAACAAAGAGCTGGTACTTCACCGAGAATATGGAACGGAA |
| | CTGCAGAGCCCCTTGCAACATCCAGATGGAAGATCCCACCTTCAAAGAGAACTACCGGTTCCACGCCATCAACGGCTACATCATGGACACACTGCCCG |
| | GCCTGGTTATGGCCCAGGATCAGAGAATCCGGTGGTATCTGCTGTCCATGGGCTCCAACGAGAATATCCACAGCATCCACTTCAGCGGCCACGTGTTC |
| | ACCGTGCGGAAAAAAGAAGAGTACAAAATGGCCCTGTACAATCTGTACCCTGGGGTGTTCGAAACCGTGGAAATGCTGCCTTCCAAGGCCGGCATTTG |
| | GAGAGTGGAATGTCTGATTGGAGAGCACCTCCACGCCGGAATGAGCACCCTGTTTCTGGTGTACAGCAACAAGTGTCAGACCCCTCTCGGCATGGCCT |
| | CTGGACACATCAGAGACTTCCAGATCACCGCCTCTGGCCAGTACGGACAGTGGGCTCCTAAACTGGCTCGGCTGCACTACAGCGGCAGCATCAATGCC |
| | TGGTCCACCAAAGAGCCCTTCAGCTGGATCAAGGTGGACCTGCTGGCTCCCATGATCATCCACGGAATCAAGACCCAGGGCGCCAGACAGAAGTTCAG |
| | CAGCCTGTACATCAGCCAGTTCATCATCATGTACAGCCTGGACGGCAAGAAGTGGCAGACCTACAGAGGCAACAGCACCGGCACACTCATGGTGTTCT |
| | TCGGCAACGTGGACTCCAGCGGCATTAAGCACAACATCTTCAACCCTCCAATCATTGCCCGGTACATCCGGCTGCACCCCACACACTACAGCATCCGG |
| | TCTACCCTGAGAATGGAACTGATGGGCTGCGACCTGAACAGCTGCTCTATGCCCCTCGGAATGGAAAGCAAGGCCATCAGCGACGCCCAGATCACAGC |
| | CAGCAGCTACTTCACCAACATGTTCGCCACTTGGAGCCCCTCCAAGGCTAGACTGCATCTGCAGGGCAGAAGCAACGCTTGGAGGCCCCAAGTGAACA |
| | ACCCCAAAGAGTGGCTGCAGGTTGACTTTCAAAAGACCATGAAAGTGACCGGCGTGACCACACAGGGCGTCAAGTCTCTGCTGACCTCTATGTACGTG |
| | AAAGAGTTCCTGATCTCCAGCAGCCAGGACGGCCATCAGTGGACCCTGTTTTTCCAGAACGGCAAAGTGAAAGTGTTCCAGGGCAATCAGGACAGCTT |
| | CACACCCGTGGTCAATTCTCTGGACCCTCCACTGCTGACCAGATACCTGCGGATTCACCCTCAGTCTTGGGTGCACCAGATCGCTCTGCGGATGGAAG |
| | TGCTGGGCTGTGAAGCTCAGGACCTCTACTAGTTAATTAAGAGCATCTTACCGCCATTTATTCCCATATTTGTTCTGTTTTTCTTGATTTGGGTATAC |
| | ATTTAAATGTTAATAAAACAAAATGGTGGGGCAATCATTTACATTTTTAGGGATATGTAATTACTAGTTCAGGTGTATTGCCACAAGACAAACATGTT |
| | AAGAAACTTTCCCGTTATTTACGCTCTGTTCCTGTTAATCAACCTCTGGATTACAAAATTTGTGAAAGATTGACTGATATTCTTAACTATGTTGCTCC |
| | TTTTACGCTGTGTGGATATGCTGCTTTATAGCCTCTGTATCTAGCTATTGCTTCCCGTACGGCTTTCGTTTTCTCCTCCTTGTATAAATCCTGGTTGC |
| | TGTCTCTTTTAGAGGAGTTGTGGCCCGTTGTCCGTCAACGTGGCGTGGTGTGCTCTGTGTTTGCTGACGCAACCCCCACTGGCTGGGGCATTGCCACC |
| | ACCTGTCAACTCCTTTCTGGGACTTTCGCTTTCCCCCTCCCGATCGCCACGGCAGAACTCATCGCCGCCTGCCTTGCCCGCTGCTGGACAGGGGCTAG |
| | GTTGCTGGGCACTGATAATTCCGTGGTGTTGTCATCGATTCCATAAAGTAGGAAACACTACACGATTCCATAAAGTAGGAAACACTACATCACTCCAT |
| | AAAGTAGGAAACACTACAGTTAACTGTGCCTTCTAGTTGCCAGCCATCTGTTGTTTGCCCCTCCCCCGTGCCTTCCTTGACCCTGGAAGGTGCCACTC |
| | CCACTGTCCTTTCCTAATAAAATGAGGAAATTGCATCGCATTGTCTGAGTAGGTGTCATTCTATTCTGGGGGGTGGGGTGGGGCAGGACAGCAAGGGG |
| | GAGGATTGGGAAGACAATAGCAGGCATGCTGGGGATGCGGTGGGCTCTATGGCGGCGCGCCGCATGGCTACGTAGATAAGTAGCATGGCGGGTTAATC |
| | ATTAACTACACCTGCAGGAGGAACCCCTAGTGATGGAGTTGGCCACTCCCTCTCTGCGCGCTCGCTCGCTCACTGAGGCCGGGCGACCAAAGGTCGCC |
| | CGACGCCCGGGCGGCCTCAGTGAGCGAGCGAGCGCGCAGCTGCCTGCAGGTCGACGCTAGCAGCTGATGCATAGCATGCGGTACCGGGAGATGGGGGA |
| | GGCTAACTGAAACACGGAAGGAGACAATACCGGAAGGAACCCGCGCTATGACGGCAATAAAAAGACAGAATAAAACGCACGGGTGTTGGGTCGTTTGT |
| | TCATAAACGCGGGGTTCGGTCCCAGGGCTGGCACTCTGTCGATACCCCACCGAGACCCCATTGGGACCAATACGCCCGCGTTTCTTCCTTTTCCCCAC |
| | CCCAACCCCCAAGTTCGGGTGAAGGCCCAGGGCTCGCAGCCAACGTCGGGGCGGCAAGCCCTGCCATAGCCACTACGGGTACGTAGGCCAACCACTAG |
| | AACTATAGCTAGAGTCCTGGGCGAACAAACGATGCTCGCCTTCCAGAAAACCGAGGATGCGAACCACTTCATCCGGGGTCAGCACCACCGGCAAGCGC |
| | CGCGACGGCCGAGGTCTACCGATCTCCTGAAGCCAGGGCAGATCCGTGCACAGCACCTTGCCGTAGAAGAACAGCAAGGCCGCCAATGCCTGACGATG |
| | CGTGGAGACCGAAACCTTGCGCTCGTTCGCCAGCCAGGACAGAAATGCCTCGACTTCGCTGCTGCCCAAGGTTGCCGGGTGACGCACACCGTGGAAAC |
| | GGATGAAGGCACGAACCCAGTTGACATAAGCCTGTTCGGTTCGTAAACTGTAATGCAAGTAGCGTATGCGCTCACGCAACTGGTCCAGAACCTTGACC |
| | GAACGCAGCGGTGGTAACGGCGCAGTGGCGGTTTTCATGGCTTGTTATGACTGTTTTTTTGTACAGTCTATGCCTCGGGCATCCAAGCAGCAAGCGCG |
| | TTACGCCGTGGGTCGATGTTTGATGTTATGGAGCAGCAACGATGTTACGCAGCAGCAACGATGTTACGCAGCAGGGCAGTCGCCCTAAAACAAAGTTA |
| | GGTGGCTCAAGTATGGGCATCATTCGCACATGTAGGCTCGGCCCTGACCAAGTCAAATCCATGCGGGCTGCTCTTGATCTTTTCGGTCGTGAGTTCGG |
| | AGACGTAGCCACCTACTCCCAACATCAGCCGGACTCCGATTACCTCGGGAACTTGCTCCGTAGTAAGACATTCATCGCGCTTGCTGCCTTCGACCAAG |
| | AAGCGGTTGTTGGCGCTCTCGCGGCTTACGTTCTGCCCAGGTTTGAGCAGCCGCGTAGTGAGATCTATATCTATGATCTCGCAGTCTCCGGCGAGCAC |
| | CGGAGGCAGGGCATTGCCACCGCGCTCATCAATCTCCTCAAGCATGAGGCCAACGCGCTTGGTGCTTATGTGATCTACGTGCAAGCAGATTACGGTGA |
| | CGATCCCGCAGTGGCTCTCTATACAAAGTTGGGCATACGGGAAGAAGTGATGCACTTTGATATCGACCCAAGTACCGCCACCTAACAATTCGTTCAAG |
| | CCGAGATCGGCTTCCCGGCCGCGGAGTTGTTCGGTAAATTGTCACAACGCCGCGAATATAGTCTTTACCATGCCCTTGGCCACGCCCCTCTTTAATAC |
| | GACGGGCAATTTGCACTTCAGAAAATGAAGAGTTTGCTTTAGCCATAACAAAAGTCCAGTATGCTTTTTCACAGCATAACTGGACTGATTTCAGTTTA |
| | CAACTATTCTGTCTAGTTTAAGACTTTATTGTCATAGTTTAGATCTATTTTGTTCAGTTTAAGACTTTATTGTCCGCCCACACCCGCTTACGCAGGGC |
| | ATCCATTTATTACTCAACCGTAACCGATTTTGCCAGGTTACGCGGCTGGTCTGCGGTGTGAAATACCGCACAGATGCGTAAGGAGAAAATACCGCATC |
| | AGGCGCTCTTCCGCTTCCTCGCTCACTGACTCGCTGCGCTCGGTCGTTCGGCTGCGGCGAGCGGTATCAGCTCACTCAAAGGCGGTAATACGGTTATC |
| | CACAGAATCAGGGGATAACGCAGGAAAGAACATGTGAGCAAAAGGCCAGCAAAAGGCCAGGAACCGTAAAAAGGCCGCGTTGCTGGCGTTTTTCCATA |
| | GGCTCCGCCCCCCTGACGAGCATCACAAAAATCGACGCTCAAGTCAGAGGTGGCGAAACCCGACAGGACTATAAAGATACCAGGCGTTTCCCCCTGGA |
| | AGCTCCCTCGTGCGCTCTCCTGTTCCGACCCTGCCGCTTACCGGATACCTGTCCGCCTTTCTCCCTTCGGGAAGCGTGGCGCTTTCTCAATGCTCACG |
| | CTGTAGGTATCTCAGTTCGGTGTAGGTCGTTCGCTCCAAGCTGGGCTGTGTGCACGAACCCCCCGTTCAGCCCGACCGCTGCGCCTTATCCGGTAACT |
| | ATCGTCTTGAGTCCAACCCGGTAAGACACGACTTATCGCCACTGGCAGCAGCCACTGGTAACAGGATTAGCAGAGCGAGGTATGTAGGCGGTGCTACA |
| | GAGTTCTTGAAGTGGTGGCCTAACTACGGCTACACTAGAAGGACAGTATTTGGTATCTGCGCTCTGCTGAAGCCAGTTACCTTCGGAAAAAGAGTTGG |
| | TAGCTCTTGATCCGGCAAACAAACCACCGCTGGTAGCGGTGGTTTTTTTGTTTGCAAGCAGCAGATTACGCGCAGAAAAAAAGGATCTCAAGAAGATC |
| | CTTTGATCTTTTCTACGGGGTCTGACGCTCAGTGGAACGAAAACTCACGTTAAGGGATTTTGGTCATGAGATTATCAAAAAGGATCTTCACCTAGATC |
| | CTTTTAAATTAAAAATGAAGTTTTAAATCAATCTAAAGTATATATGAGTAAACTTGGTCTGACAGTTACCAATGCTTAATCAGTGAGGCACCTATCTC |
| | AGCGATCTGTCTATTTCGTTCATCCATAGTTGCCTGACTCCCCGTCGTGTAGATAACTACGATACGGGAGGGCTTACCATCTGGCCCCAGTGCTGCAA |
| | TGATACCGCGAGACCCACGCTCACCGGCTCCAGATTTATCAGCAATAAACCAGCCAGCCGGAAGGGCCGAGCGCAGAAGTGGTCCTGCAACTTTATCC |
| | GCCTCCATCCAGTCTATTAATTGTTGCCGGGAAGCTAGAGTAAGTAGTTCGCCAGTTAATAGTTTGCGCAACGTTGTTGCCATTGCTACAGGCATCGT |
| | GGTGTCACGCTCGTCGTTTGGTATGGCTTCATTCAGCTCCGGTTCCCAACGATCAAGGCGAGTTACATGATCCCCCATGTTGTGCAAAAAAGCGGTTA |
| | GCTCCTTCGGTCCTCCGATCGTTGTCAGAAGTAAGTTGGCCGCAGTGTTATCACTCATGGTTATGGCAGCACTGCATAATTCTCTTACTGTCATGCCA |
| | TCCGTAAGATGCTTTTCTGTGACTGGTGAGTACTCAACCAAGTCATTCTGAGAATAGTGTATGCGGCGACCGAGTTGCTCTTGCCCGGCGTCAATACG |
| | GGATAATACCGCGCCACATAGCAGAACTTTAAAAGTGCTCATCATTGGAAAACGTTCTTCGGGGCGAAAACTCTCAAGGATCTTACCGCTGTTGAGAT |
| | CCAGTTCGATGTAACCCACTCGTGCACCCAACTGATCTTCAGCATCTTTTACTTTCACCAGCGTTTCTGGGTGAGCAAAAACAGGAAGGCAAAATGCC |
| | GCAAAAAAGGGAATAAGGGCGACACGGAAATGTTGAATACTCATACTCTTCCTTTTTCAATATTATTGAAGCATTTATCAGGGTTATTGTCTCATGAG |
| | CGGATACATATTTGAATGTATTTAGAAAAATAAACAAATAGGGGTTCCGCGCACATTTCCCCGAAAAGTGCCACCTGAAATTGTAAACGTTAATATTT |
| | TGTTAAAATTCGCGTTAAATTTTTGTTAAATCAGCTCATTTTTTAACCAATAGGCCGAAATCGGCAAAATCCCTTATAAATCAAAAGAATAGACCGAG |
| | ATAGGGTTGAGTGTTGTTCCAGTTTGGAACAAGAGTCCACTATTAAAGAACGTGGACTCCAACGTCAAAGGGCGAAAAACCGTCTATCAGGGCGATGG |
| | CCCACTACGTGAACCATCACCCTAATCAAGTTTTTTGGGGTCGAGGTGCCGTAAAGCACTAAATCGGAACCCTAAAGGGAGCCCCCGATTTAGAGCTT |
| | GACGGGGAAAGCCGGCGAACGTGGCGAGAAAGGAAGGGAAGAAAGCGAAAGGAGCGGGCGCTAGGGCGCTGGCAAGTGTAGCGGTCACGCTGCGCGTA |
| | ACCACCACACCCGCCGCGCTTAATGCGCCGCTACAGGGCGCGTCCCATTCGCCATTCAGGCTGCAAATAAGCGTTGATATTCAGTCAATTACAAACAT |
| | TAATAACGAAGAGATGACAGAAAAATTTTCATTCTGTGACAGAGAA |
| ceDNAFVIII- | AAAGTAGCCGAAGATGACGGTTTGTCACATGGAGTTGGCAGGATGTTTGATTAAAAACATAACAGGAAGAAAAATGCCCCGCTGTGGGCGGACAAAAT |
| vector 11 | AGTTGGGAACTGGGAGGGGTGGAAATGGAGTTTTTAAGGATTATTTAGGGAAGAGTGACAAAATAGATGGGAACTGGGTGTAGCGTCGTAAGCTAATA |
| (SEQ ID NO: | CGAAAATTAAAAATGACAAAATAGTTTGGAACTAGATTTCACTTATCTGGTTCGGATCTCCTAGGCCTGCAGGCAGCTGCGCGCTCGCTCGCTCACTG |
| 202) | AGGCCGCCCGGGCAAAGCCCGGGCGTCGGGCGACCTTTGGTCGCCCGGCCTCAGTGAGCGAGCGAGCGCGCAGAGAGGGAGTGGCCAACTCCATCACT |
| | AGGGGTTCCTTGTAGTTAATGATTAACCCGCCATGCTACTTATCGCGGCCGCCGGGGGAGGCTGCTGGTGAATATTAACCAAGGTCACCCCAGTTATC |
| | GGAGGAGCAAACAGGGGCTAAGTCCACACGCGTGGTACCGTCTGTCTGCACATTTCGTAGAGCGAGTGTTCCGATACTCTAATCTCCCTAGGCAAGGT |
| | TCATATTTGTGTAGGTTACTTATTCTCCTTTTGTTGACTAAGTCAATAATCAGAATCAGCAGGTTTGGAGTCAGCTTGGCAGGGATCAGCAGCCTGGG |
| | TTGGAAGGAGGGGGTATAAAAGCCCCTTCACCAGGAGAAGCCGTCACACAGATCCACAAGCTCCTGAAGAGGTAAGGGTTTAAGGGATGGTTGGTTGG |
| | TGGGGTATTAATGTTTAATTACCTGGAGCACCTGCCTGAAATCACTTTTTTTCAGGTTGGTTTAAACCGCAGCCACCATGCAGATCGAGCTGTCTACC |
| | TGCTTCTTCCTGTGCCTGCTGCGGTTCTGCTTCAGCGCCACCAGAAGATATTACCTGGGCGCCGTGGAACTGAGCTGGGACTACATGCAGTCTGACCT |
| | GGGAGAGCTGCCCGTGGACGCTAGATTTCCTCCAAGAGTGCCCAAGAGCTTCCCCTTCAACACCTCCGTGGTGTACAAGAAAACCCTGTTCGTGGAAT |
| | TCACCGACCACCTGTTCAATATCGCCAAGCCTCGGCCTCCTTGGATGGGACTGCTGGGACCTACAATTCAGGCCGAGGTGTACGACACCGTGGTCATC |
| | ACCCTGAAGAACATGGCCAGCCATCCTGTGTCTCTGCACGCCGTGGGAGTGTCTTATTGGAAGGCTTCTGAGGGCGCCGAGTACGACGATCAGACAAG |
| | CCAGAGAGAGAAAGAGGACGACAAGGTTTTCCCTGGCGGCAGCCACACCTATGTCTGGCAGGTCCTGAAAGAAAACGGCCCTATGGCCTCCGATCCTC |
| | TGTGCCTGACATACAGCTACCTGAGCCACGTGGACCTGGTCAAGGACCTGAATTCTGGCCTGATCGGAGCCCTGCTCGTGTGTAGAGAAGGCAGCCTG |
| | GCCAAAGAGAAAACCCAGACACTGCACAAGTTCATCCTGCTGTTCGCCGTGTTCGACGAGGGCAAGAGCTGGCACAGCGAGACAAAGAACAGCCTGAT |
| | GCAGGACAGGGATGCCGCCTCTGCTAGAGCTTGGCCTAAGATGCACACCGTGAACGGCTACGTGAACAGAAGCCTGCCTGGACTGATCGGCTGCCACA |
| | GAAAGTCCGTGTACTGGCACGTGATCGGCATGGGCACAACACCTGAGGTGCACAGCATCTTTCTGGAAGGCCACACCTTCCTCGTGCGGAACCACAGA |
| | CAGGCCAGCCTGGAAATCAGCCCTATCACCTTCCTGACCGCTCAGACCCTGCTGATGGATCTGGGCCAGTTTCTGCTGTTCTGCCACATCAGCTCCCA |
| | CCAGCACGATGGCATGGAAGCCTACGTGAAGGTGGACAGCTGCCCCGAAGAACCCCAGCTGCGGATGAAGAACAACGAGGAAGCCGAGGACTACGACG |
| | ACGACCTGACCGACTCTGAGATGGACGTCGTCAGATTCGACGACGATAACAGCCCCAGCTTCATCCAGATCAGAAGCGTGGCCAAGAAGCACCCCAAG |
| | ACCTGGGTGCACTATATCGCCGCCGAGGAAGAGGACTGGGATTACGCTCCTCTGGTGCTGGCCCCTGACGACAGAAGCTACAAGAGCCAGTACCTGAA |
| | CAACGGCCCTCAGCGGATCGGCCGGAAGTATAAGAAAGTGCGGTTCATGGCCTACACCGACGAGACATTCAAGACCAGAGAGGCCATCCAGCACGAGA |
| | GCGGAATTCTGGGCCCTCTGCTGTATGGCGAAGTGGGCGATACACTGCTGATCATCTTCAAGAACCAGGCCAGCAGACCCTACAACATCTACCCTCAC |
| | GGCATCACCGATGTGCGGCCCCTGTATTCTAGAAGGCTGCCCAAGGGCGTGAAGCACCTGAAGGACTTCCCTATCCTGCCTGGCGAGATTTTCAAGTA |
| | CAAGTGGACCGTGACCGTGGAAGATGGCCCCACCAAGAGCGACCCTAGATGTCTGACACGGTACTACAGCAGCTTCGTGAACATGGAACGCGACCTGG |
| | CCAGCGGCCTGATTGGACCTCTGCTGATCTGCTACAAAGAAAGCGTGGACCAGCGGGGCAACCAGATCATGAGCGACAAGCGGAACGTGATCCTGTTT |
| | AGCGTGTTCGATGAGAACCGGTCCTGGTATCTGACCGAGAACATCCAGCGGTTTCTGCCCAATCCTGCCGGGGTGCAACTGGAAGATCCTGAGTTCCA |
| | GGCAAGCAACATCATGCACTCCATCAATGGCTATGTGTTCGACAGCCTGCAGCTGAGCGTGTGCCTGCACGAAGTGGCCTACTGGTACATCCTGAGCA |
| | TTGGCGCCCAGACCGACTTCCTGTCCGTGTTCTTTAGCGGCTACACCTTCAAGCACAAGATGGTGTACGAGGATACCCTGACACTGTTCCCATTCAGC |
| | GGCGAGACAGTGTTCATGAGCATGGAAAACCCCGGCCTGTGGATTCTGGGCTGTCACAACAGCGACTTCCGGAACAGAGGCATGACAGCCCTGCTGAA |
| | GGTGTCCAGCTGCGACAAGAACACCGGCGACTACTACGAGGACAGCTATGAGGACATCAGCGCCTACCTGCTGAGCAAGAACAATGCCATCGAGCCTC |
| | GGAGCTTCAGCCAGAATCCTCCTGTGCTGAAGCGGCACCAGCGCGAGATCACCAGAACAACCCTGCAGAGCGACCAAGAGGAAATCGATTACGACGAC |
| | ACCATCAGCGTCGAGATGAAGAAAGAAGATTTCGACATCTACGACGAGGACGAGAATCAGAGCCCCAGAAGCTTTCAGAAAAAGACCCGGCACTACTT |
| | CATTGCCGCCGTCGAGAGACTGTGGGACTACGGCATGTCTAGCAGCCCTCACGTGCTGAGAAATAGAGCCCAGAGCGGCAGCGTGCCCCAGTTCAAGA |
| | AAGTGGTGTTCCAAGAGTTCACCGACGGCAGCTTCACCCAGCCACTGTATAGAGGCGAGCTGAACGAGCATCTGGGCCTGCTGGGCCCTTATATCAGA |
| | GCCGAAGTGGAAGATAACATCATGGTCACCTTCCGGAATCAGGCTAGCCGGCCTTACAGCTTCTACAGCTCCCTGATCAGCTACGAAGAGGACCAGAG |
| | ACAGGGCGCTGAGCCCAGAAAGAACTTCGTGAAGCCCAACGAGACTAAGACCTACTTTTGGAAGGTGCAGCACCACATGGCCCCTACAAAGGACGAGT |
| | TCGACTGCAAAGCCTGGGCCTACTTCTCCGATGTGGATCTGGAAAAGGACGTGCACAGCGGGCTCATCGGACCACTGCTTGTGTGCCACACCAACACA |
| | CTGAACCCCGCTCACGGCAGACAAGTGACAGTGCAAGAGTTCGCCCTGTTCTTCACCATCTTCGACGAAACAAAGAGCTGGTACTTCACCGAGAATAT |
| | GGAACGGAACTGCAGAGCCCCTTGCAACATCCAGATGGAAGATCCCACCTTCAAAGAGAACTACCGGTTCCACGCCATCAACGGCTACATCATGGACA |
| | CACTGCCCGGCCTGGTTATGGCCCAGGATCAGAGAATCCGGTGGTATCTGCTGTCCATGGGCTCCAACGAGAATATCCACAGCATCCACTTCAGCGGC |
| | CACGTGTTCACCGTGCGGAAAAAAGAAGAGTACAAAATGGCCCTGTACAATCTGTACCCTGGGGTGTTCGAAACCGTGGAAATGCTGCCTTCCAAGGC |
| | CGGCATTTGGAGAGTGGAATGTCTGATTGGAGAGCACCTCCACGCCGGAATGAGCACCCTGTTTCTGGTGTACAGCAACAAGTGTCAGACCCCTCTCG |
| | GCATGGCCTCTGGACACATCAGAGACTTCCAGATCACCGCCTCTGGCCAGTACGGACAGTGGGCTCCTAAACTGGCTCGGCTGCACTACAGCGGCAGC |
| | ATCAATGCCTGGTCCACCAAAGAGCCCTTCAGCTGGATCAAGGTGGACCTGCTGGCTCCCATGATCATCCACGGAATCAAGACCCAGGGCGCCAGACA |
| | GAAGTTCAGCAGCCTGTACATCAGCCAGTTCATCATCATGTACAGCCTGGACGGCAAGAAGTGGCAGACCTACAGAGGCAACAGCACCGGCACACTCA |
| | TGGTGTTCTTCGGCAACGTGGACTCCAGCGGCATTAAGCACAACATCTTCAACCCTCCAATCATTGCCCGGTACATCCGGCTGCACCCCACACACTAC |
| | AGCATCCGGTCTACCCTGAGAATGGAACTGATGGGCTGCGACCTGAACAGCTGCTCTATGCCCCTCGGAATGGAAAGCAAGGCCATCAGCGACGCCCA |
| | GATCACAGCCAGCAGCTACTTCACCAACATGTTCGCCACTTGGAGCCCCTCCAAGGCTAGACTGCATCTGCAGGGCAGAAGCAACGCTTGGAGGCCCC |
| | AAGTGAACAACCCCAAAGAGTGGCTGCAGGTTGACTTTCAAAAGACCATGAAAGTGACCGGCGTGACCACACAGGGCGTCAAGTCTCTGCTGACCTCT |
| | ATGTACGTGAAAGAGTTCCTGATCTCCAGCAGCCAGGACGGCCATCAGTGGACCCTGTTTTTCCAGAACGGCAAAGTGAAAGTGTTCCAGGGCAATCA |
| | GGACAGCTTCACACCCGTGGTCAATTCTCTGGACCCTCCACTGCTGACCAGATACCTGCGGATTCACCCTCAGTCTTGGGTGCACCAGATCGCTCTGC |
| | GGATGGAAGTGCTGGGCTGTGAAGCTCAGGACCTCTACTAGTTAATTAAGAGCATCTTACCGCCATTTATTCCCATATTTGTTCTGTTTTTCTTGATT |
| | TGGGTATACATTTAAATGTTAATAAAACAAAATGGTGGGGCAATCATTTACATTTTTAGGGATATGTAATTACTAGTTCAGGTGTATTGCCACAAGAC |
| | AAACATGTTAAGAAACTTTCCCGTTATTTACGCTCTGTTCCTGTTAATCAACCTCTGGATTACAAAATTTGTGAAAGATTGACTGATATTCTTAACTA |
| | TGTTGCTCCTTTTACGCTGTGTGGATATGCTGCTTTATAGCCTCTGTATCTAGCTATTGCTTCCCGTACGGCTTTCGTTTTCTCCTCCTTGTATAAAT |
| | CCTGGTTGCTGTCTCTTTTAGAGGAGTTGTGGCCCGTTGTCCGTCAACGTGGCGTGGTGTGCTCTGTGTTTGCTGACGCAACCCCCACTGGCTGGGGC |
| | ATTGCCACCACCTGTCAACTCCTTTCTGGGACTTTCGCTTTCCCCCTCCCGATCGCCACGGCAGAACTCATCGCCGCCTGCCTTGCCCGCTGCTGGAC |
| | AGGGGCTAGGTTGCTGGGCACTGATAATTCCGTGGTGTTGTCTGTGCCTTCTAGTTGCCAGCCATCTGTTGTTTGCCCCTCCCCCGTGCCTTCCTTGA |
| | CCCTGGAAGGTGCCACTCCCACTGTCCTTTCCTAATAAAATGAGGAAATTGCATCGCATTGTCTGAGTAGGTGTCATTCTATTCTGGGGGGTGGGGTG |
| | GGGCAGGACAGCAAGGGGGAGGATTGGGAAGACAATAGCAGGCATGCTGGGGATGCGGTGGGCTCTATGGCTCTAGAGCATGGCTACGTAGATAAGTA |
| | GCATGGCGGGTTAATCATTAACTACACCTGCAGGAGGAACCCCTAGTGATGGAGTTGGCCACTCCCTCTCTGCGCGCTCGCTCGCTCACTGAGGCCGG |
| | GCGACCAAAGGTCGCCCGACGCCCGGGCGGCCTCAGTGAGCGAGCGAGCGCGCAGCTGCCTGCAGGGGCGCGCCTCGAGCCATGGTGCTAGCAGCTGA |
| | TGCATAGCATGCGGTACCGGGAGATGGGGGAGGCTAACTGAAACACGGAAGGAGACAATACCGGAAGGAACCCGCGCTATGACGGCAATAAAAAGACA |
| | GAATAAAACGCACGGGTGTTGGGTCGTTTGTTCATAAACGCGGGGTTCGGTCCCAGGGCTGGCACTCTGTCGATACCCCACCGAGACCCCATTGGGAC |
| | CAATACGCCCGCGTTTCTTCCTTTTCCCCACCCCAACCCCCAAGTTCGGGTGAAGGCCCAGGGCTCGCAGCCAACGTCGGGGCGGCAAGCCCTGCCAT |
| | AGCCACTACGGGTACGTAGGCCAACCACTAGAACTATAGCTAGAGTCCTGGGCGAACAAACGATGCTCGCCTTCCAGAAAACCGAGGATGCGAACCAC |
| | TTCATCCGGGGTCAGCACCACCGGCAAGCGCCGCGACGGCCGAGGTCTACCGATCTCCTGAAGCCAGGGCAGATCCGTGCACAGCACCTTGCCGTAGA |
| | AGAACAGCAAGGCCGCCAATGCCTGACGATGCGTGGAGACCGAAACCTTGCGCTCGTTCGCCAGCCAGGACAGAAATGCCTCGACTTCGCTGCTGCCC |
| | AAGGTTGCCGGGTGACGCACACCGTGGAAACGGATGAAGGCACGAACCCAGTTGACATAAGCCTGTTCGGTTCGTAAACTGTAATGCAAGTAGCGTAT |
| | GCGCTCACGCAACTGGTCCAGAACCTTGACCGAACGCAGCGGTGGTAACGGCGCAGTGGCGGTTTTCATGGCTTGTTATGACTGTTTTTTTGTACAGT |
| | CTATGCCTCGGGCATCCAAGCAGCAAGCGCGTTACGCCGTGGGTCGATGTTTGATGTTATGGAGCAGCAACGATGTTACGCAGCAGCAACGATGTTAC |
| | GCAGCAGGGCAGTCGCCCTAAAACAAAGTTAGGTGGCTCAAGTATGGGCATCATTCGCACATGTAGGCTCGGCCCTGACCAAGTCAAATCCATGCGGG |
| | CTGCTCTTGATCTTTTCGGTCGTGAGTTCGGAGACGTAGCCACCTACTCCCAACATCAGCCGGACTCCGATTACCTCGGGAACTTGCTCCGTAGTAAG |
| | ACATTCATCGCGCTTGCTGCCTTCGACCAAGAAGCGGTTGTTGGCGCTCTCGCGGCTTACGTTCTGCCCAGGTTTGAGCAGCCGCGTAGTGAGATCTA |
| | TATCTATGATCTCGCAGTCTCCGGCGAGCACCGGAGGCAGGGCATTGCCACCGCGCTCATCAATCTCCTCAAGCATGAGGCCAACGCGCTTGGTGCTT |
| | ATGTGATCTACGTGCAAGCAGATTACGGTGACGATCCCGCAGTGGCTCTCTATACAAAGTTGGGCATACGGGAAGAAGTGATGCACTTTGATATCGAC |
| | CCAAGTACCGCCACCTAACAATTCGTTCAAGCCGAGATCGGCTTCCCGGCCGCGGAGTTGTTCGGTAAATTGTCACAACGCCGCGAATATAGTCTTTA |
| | CCATGCCCTTGGCCACGCCCCTCTTTAATACGACGGGCAATTTGCACTTCAGAAAATGAAGAGTTTGCTTTAGCCATAACAAAAGTCCAGTATGCTTT |
| | TTCACAGCATAACTGGACTGATTTCAGTTTACAACTATTCTGTCTAGTTTAAGACTTTATTGTCATAGTTTAGATCTATTTTGTTCAGTTTAAGACTT |
| | TATTGTCCGCCCACACCCGCTTACGCAGGGCATCCATTTATTACTCAACCGTAACCGATTTTGCCAGGTTACGCGGCTGGTCTGCGGTGTGAAATACC |
| | GCACAGATGCGTAAGGAGAAAATACCGCATCAGGCGCTCTTCCGCTTCCTCGCTCACTGACTCGCTGCGCTCGGTCGTTCGGCTGCGGCGAGCGGTAT |
| | CAGCTCACTCAAAGGCGGTAATACGGTTATCCACAGAATCAGGGGATAACGCAGGAAAGAACATGTGAGCAAAAGGCCAGCAAAAGGCCAGGAACCGT |
| | AAAAAGGCCGCGTTGCTGGCGTTTTTCCATAGGCTCCGCCCCCCTGACGAGCATCACAAAAATCGACGCTCAAGTCAGAGGTGGCGAAACCCGACAGG |
| | ACTATAAAGATACCAGGCGTTTCCCCCTGGAAGCTCCCTCGTGCGCTCTCCTGTTCCGACCCTGCCGCTTACCGGATACCTGTCCGCCTTTCTCCCTT |
| | CGGGAAGCGTGGCGCTTTCTCAATGCTCACGCTGTAGGTATCTCAGTTCGGTGTAGGTCGTTCGCTCCAAGCTGGGCTGTGTGCACGAACCCCCCGTT |
| | CAGCCCGACCGCTGCGCCTTATCCGGTAACTATCGTCTTGAGTCCAACCCGGTAAGACACGACTTATCGCCACTGGCAGCAGCCACTGGTAACAGGAT |
| | TAGCAGAGCGAGGTATGTAGGCGGTGCTACAGAGTTCTTGAAGTGGTGGCCTAACTACGGCTACACTAGAAGGACAGTATTTGGTATCTGCGCTCTGC |
| | TGAAGCCAGTTACCTTCGGAAAAAGAGTTGGTAGCTCTTGATCCGGCAAACAAACCACCGCTGGTAGCGGTGGTTTTTTTGTTTGCAAGCAGCAGATT |
| | ACGCGCAGAAAAAAAGGATCTCAAGAAGATCCTTTGATCTTTTCTACGGGGTCTGACGCTCAGTGGAACGAAAACTCACGTTAAGGGATTTTGGTCAT |
| | GAGATTATCAAAAAGGATCTTCACCTAGATCCTTTTAAATTAAAAATGAAGTTTTAAATCAATCTAAAGTATATATGAGTAAACTTGGTCTGACAGTT |
| | ACCAATGCTTAATCAGTGAGGCACCTATCTCAGCGATCTGTCTATTTCGTTCATCCATAGTTGCCTGACTCCCCGTCGTGTAGATAACTACGATACGG |
| | GAGGGCTTACCATCTGGCCCCAGTGCTGCAATGATACCGCGAGACCCACGCTCACCGGCTCCAGATTTATCAGCAATAAACCAGCCAGCCGGAAGGGC |
| | CGAGCGCAGAAGTGGTCCTGCAACTTTATCCGCCTCCATCCAGTCTATTAATTGTTGCCGGGAAGCTAGAGTAAGTAGTTCGCCAGTTAATAGTTTGC |
| | GCAACGTTGTTGCCATTGCTACAGGCATCGTGGTGTCACGCTCGTCGTTTGGTATGGCTTCATTCAGCTCCGGTTCCCAACGATCAAGGCGAGTTACA |
| | TGATCCCCCATGTTGTGCAAAAAAGCGGTTAGCTCCTTCGGTCCTCCGATCGTTGTCAGAAGTAAGTTGGCCGCAGTGTTATCACTCATGGTTATGGC |
| | AGCACTGCATAATTCTCTTACTGTCATGCCATCCGTAAGATGCTTTTCTGTGACTGGTGAGTACTCAACCAAGTCATTCTGAGAATAGTGTATGCGGC |
| | GACCGAGTTGCTCTTGCCCGGCGTCAATACGGGATAATACCGCGCCACATAGCAGAACTTTAAAAGTGCTCATCATTGGAAAACGTTCTTCGGGGCGA |
| | AAACTCTCAAGGATCTTACCGCTGTTGAGATCCAGTTCGATGTAACCCACTCGTGCACCCAACTGATCTTCAGCATCTTTTACTTTCACCAGCGTTTC |
| | TGGGTGAGCAAAAACAGGAAGGCAAAATGCCGCAAAAAAGGGAATAAGGGCGACACGGAAATGTTGAATACTCATACTCTTCCTTTTTCAATATTATT |
| | GAAGCATTTATCAGGGTTATTGTCTCATGAGCGGATACATATTTGAATGTATTTAGAAAAATAAACAAATAGGGGTTCCGCGCACATTTCCCCGAAAA |
| | GTGCCACCTGAAATTGTAAACGTTAATATTTTGTTAAAATTCGCGTTAAATTTTTGTTAAATCAGCTCATTTTTTAACCAATAGGCCGAAATCGGCAA |
| | AATCCCTTATAAATCAAAAGAATAGACCGAGATAGGGTTGAGTGTTGTTCCAGTTTGGAACAAGAGTCCACTATTAAAGAACGTGGACTCCAACGTCA |
| | AAGGGCGAAAAACCGTCTATCAGGGCGATGGCCCACTACGTGAACCATCACCCTAATCAAGTTTTTTGGGGTCGAGGTGCCGTAAAGCACTAAATCGG |
| | AACCCTAAAGGGAGCCCCCGATTTAGAGCTTGACGGGGAAAGCCGGCGAACGTGGCGAGAAAGGAAGGGAAGAAAGCGAAAGGAGCGGGCGCTAGGGC |
| | GCTGGCAAGTGTAGCGGTCACGCTGCGCGTAACCACCACACCCGCCGCGCTTAATGCGCCGCTACAGGGCGCGTCCCATTCGCCATTCAGGCTGCAAA |
| | TAAGCGTTGATATTCAGTCAATTACAAACATTAATAACGAAGAGATGACAGAAAAATTTTCATTCTGTGACAGAGAA |
| ceDNAFVIII- | GGCCGGCCCCTGCAGGCAGCTGCGCGCTCGCTCGCTCACTGAGGCCGCCCGGGCAAAGCCCGGGCGTCGGGCGACCTTTGGTCGCCCGGCCTCAGTGA |
| vector 12 | GCGAGCGAGCGCGCAGAGAGGGAGTGGCCAACTCCATCACTAGGGGTTCCTTGTAGTTAATGATTAACCCGCCATGCTACTTATCTACGTAGCCATGC |
| (SEQ ID NO: | TCTAGAGTTTGCTGCTTGCAATGTTTGCCCATTTTAGGGTGGACACAGGACGCTGTGGTTTCTGAGCCAGGGGGCGACTCAGATCCCAGCCAGTGGAC |
| 203) | TTAGCCCCTGTTTGCTCCTCCGATAACTGGGGTGACCTTGGTTAATATTCACCAGCAGCCTCCCCCGTTGCCCCTCTGGATCCACTGCTTAAATACGG |
| | ACGAGGACAGGGCCCTGTCTCCTCAGCTTCAGGCACCACCACTGACCTGGGACAGTGAATCGCCACCATGCAGATTGAGCTGAGCACCTGCTTCTTCC |
| | TGTGCCTGCTGAGGTTCTGCTTCTCTGCCACCAGGAGATACTACCTGGGGGCTGTGGAGCTGAGCTGGGACTACATGCAGTCTGACCTGGGGGAGCTG |
| | CCTGTGGATGCCAGGTTCCCCCCCAGAGTGCCCAAGAGCTTCCCCTTCAACACCTCTGTGGTGTACAAGAAGACCCTGTTTGTGGAGTTCACTGACCA |
| | CCTGTTCAACATTGCCAAGCCCAGGCCCCCCTGGATGGGCCTGCTGGGCCCCACCATCCAGGCTGAGGTGTATGACACTGTGGTGATCACCCTGAAGA |
| | ACATGGCCAGCCACCCTGTGAGCCTGCATGCTGTGGGGGTGAGCTACTGGAAGGCCTCTGAGGGGGCTGAGTATGATGACCAGACCAGCCAGAGGGAG |
| | AAGGAGGATGACAAGGTGTTCCCTGGGGGCAGCCACACCTATGTGTGGCAGGTGCTGAAGGAGAATGGCCCCATGGCCTCTGACCCCCTGTGCCTGAC |
| | CTACAGCTACCTGAGCCATGTGGACCTGGTGAAGGACCTGAACTCTGGCCTGATTGGGGCCCTGCTGGTGTGCAGGGAGGGCAGCCTGGCCAAGGAGA |
| | AGACCCAGACCCTGCACAAGTTCATCCTGCTGTTTGCTGTGTTTGATGAGGGCAAGAGCTGGCACTCTGAAACCAAGAACAGCCTGATGCAGGACAGG |
| | GATGCTGCCTCTGCCAGGGCCTGGCCCAAGATGCACACTGTGAATGGCTATGTGAACAGGAGCCTGCCTGGCCTGATTGGCTGCCACAGGAAGTCTGT |
| | GTACTGGCATGTGATTGGCATGGGCACCACCCCTGAGGTGCACAGCATCTTCCTGGAGGGCCACACCTTCCTGGTCAGGAACCACAGGCAGGCCAGCC |
| | TGGAGATCAGCCCCATCACCTTCCTGACTGCCCAGACCCTGCTGATGGACCTGGGCCAGTTCCTGCTGTTCTGCCACATCAGCAGCCACCAGCATGAT |
| | GGCATGGAGGCCTATGTGAAGGTGGACAGCTGCCCTGAGGAGCCCCAGCTGAGGATGAAGAACAATGAGGAGGCTGAGGACTATGATGATGACCTGAC |
| | TGACTCTGAGATGGATGTGGTGAGGTTTGATGATGACAACAGCCCCAGCTTCATCCAGATCAGGTCTGTGGCCAAGAAGCACCCCAAGACCTGGGTGC |
| | ACTACATTGCTGCTGAGGAGGAGGACTGGGACTATGCCCCCCTGGTGCTGGCCCCTGATGACAGGAGCTACAAGAGCCAGTACCTGAACAATGGCCCC |
| | CAGAGGATTGGCAGGAAGTACAAGAAGGTCAGGTTCATGGCCTACACTGATGAAACCTTCAAGACCAGGGAGGCCATCCAGCATGAGTCTGGCATCCT |
| | GGGCCCCCTGCTGTATGGGGAGGTGGGGGACACCCTGCTGATCATCTTCAAGAACCAGGCCAGCAGGCCCTACAACATCTACCCCCATGGCATCACTG |
| | ATGTGAGGCCCCTGTACAGCAGGAGGCTGCCCAAGGGGGTGAAGCACCTGAAGGACTTCCCCATCCTGCCTGGGGAGATCTTCAAGTACAAGTGGACT |
| | GTGACTGTGGAGGATGGCCCCACCAAGTCTGACCCCAGGTGCCTGACCAGATACTACAGCAGCTTTGTGAACATGGAGAGGGACCTGGCCTCTGGCCT |
| | GATTGGCCCCCTGCTGATCTGCTACAAGGAGTCTGTGGACCAGAGGGGCAACCAGATCATGTCTGACAAGAGGAATGTGATCCTGTTCTCTGTGTTTG |
| | ATGAGAACAGGAGCTGGTACCTGACTGAGAACATCCAGAGGTTCCTGCCCAACCCTGCTGGGGTGCAGCTGGAGGACCCTGAGTTCCAGGCCAGCAAC |
| | ATCATGCACAGCATCAATGGCTATGTGTTTGACAGCCTGCAGCTGTCTGTGTGCCTGCATGAGGTGGCCTACTGGTACATCCTGAGCATTGGGGCCCA |
| | GACTGACTTCCTGTCTGTGTTCTTCTCTGGCTACACCTTCAAGCACAAGATGGTGTATGAGGACACCCTGACCCTGTTCCCCTTCTCTGGGGAGACTG |
| | TGTTCATGAGCATGGAGAACCCTGGCCTGTGGATTCTGGGCTGCCACAACTCTGACTTCAGGAACAGGGGCATGACTGCCCTGCTGAAAGTCTCCAGC |
| | TGTGACAAGAACACTGGGGACTACTATGAGGACAGCTATGAGGACATCTCTGCCTACCTGCTGAGCAAGAACAATGCCATTGAGCCCAGGAGCTTCAG |
| | CCAGAACCCCCCAGTGCTGAAGAGGCACCAGAGGGAGATCACCAGGACCACCCTGCAGTCTGACCAGGAGGAGATTGACTATGATGACACCATCTCTG |
| | TGGAGATGAAGAAGGAGGACTTTGACATCTACGACGAGGACGAGAACCAGAGCCCCAGGAGCTTCCAGAAGAAGACCAGGCACTACTTCATTGCTGCT |
| | GTGGAGAGGCTGTGGGACTATGGCATGAGCAGCAGCCCCCATGTGCTGAGGAACAGGGCCCAGTCTGGCTCTGTGCCCCAGTTCAAGAAGGTGGTGTT |
| | CCAGGAGTTCACTGATGGCAGCTTCACCCAGCCCCTGTACAGAGGGGAGCTGAATGAGCACCTGGGCCTGCTGGGCCCCTACATCAGGGCTGAGGTGG |
| | AGGACAACATCATGGTGACCTTCAGGAACCAGGCCAGCAGGCCCTACAGCTTCTACAGCAGCCTGATCAGCTATGAGGAGGACCAGAGGCAGGGGGCT |
| | GAGCCCAGGAAGAACTTTGTGAAGCCCAATGAAACCAAGACCTACTTCTGGAAGGTGCAGCACCACATGGCCCCCACCAAGGATGAGTTTGACTGCAA |
| | GGCCTGGGCCTACTTCTCTGATGTGGACCTGGAGAAGGATGTGCACTCTGGCCTGATTGGCCCCCTGCTGGTGTGCCACACCAACACCCTGAACCCTG |
| | CCCATGGCAGGCAGGTGACTGTGCAGGAGTTTGCCCTGTTCTTCACCATCTTTGATGAAACCAAGAGCTGGTACTTCACTGAGAACATGGAGAGGAAC |
| | TGCAGGGCCCCCTGCAACATCCAGATGGAGGACCCCACCTTCAAGGAGAACTACAGGTTCCATGCCATCAATGGCTACATCATGGACACCCTGCCTGG |
| | CCTGGTGATGGCCCAGGACCAGAGGATCAGGTGGTACCTGCTGAGCATGGGCAGCAATGAGAACATCCACAGCATCCACTTCTCTGGCCATGTGTTCA |
| | CTGTGAGGAAGAAGGAGGAGTACAAGATGGCCCTGTACAACCTGTACCCTGGGGTGTTTGAGACTGTGGAGATGCTGCCCAGCAAGGCTGGCATCTGG |
| | AGGGTGGAGTGCCTGATTGGGGAGCACCTGCATGCTGGCATGAGCACCCTGTTCCTGGTGTACAGCAACAAGTGCCAGACCCCCCTGGGCATGGCCTC |
| | TGGCCACATCAGGGACTTCCAGATCACTGCCTCTGGCCAGTATGGCCAGTGGGCCCCCAAGCTGGCCAGGCTGCACTACTCTGGCAGCATCAATGCCT |
| | GGAGCACCAAGGAGCCCTTCAGCTGGATCAAGGTGGACCTGCTGGCCCCCATGATCATCCATGGCATCAAGACCCAGGGGGCCAGGCAGAAGTTCAGC |
| | AGCCTGTACATCAGCCAGTTCATCATCATGTACAGCCTGGATGGCAAGAAGTGGCAGACCTACAGGGGCAACAGCACTGGCACCCTGATGGTGTTCTT |
| | TGGCAATGTGGACAGCTCTGGCATCAAGCACAACATCTTCAACCCCCCCATCATTGCCAGATACATCAGGCTGCACCCCACCCACTACAGCATCAGGA |
| | GCACCCTGAGGATGGAGCTGATGGGCTGTGACCTGAACAGCTGCAGCATGCCCCTGGGCATGGAGAGCAAGGCCATCTCTGATGCCCAGATCACTGCC |
| | AGCAGCTACTTCACCAACATGTTTGCCACCTGGAGCCCCAGCAAGGCCAGGCTGCACCTGCAGGGCAGGAGCAATGCCTGGAGGCCCCAGGTCAACAA |
| | CCCCAAGGAGTGGCTGCAGGTGGACTTCCAGAAGACCATGAAGGTGACTGGGGTGACCACCCAGGGGGTGAAGAGCCTGCTGACCAGCATGTATGTGA |
| | AGGAGTTCCTGATCAGCAGCAGCCAGGATGGCCACCAGTGGACCCTGTTCTTCCAGAATGGCAAGGTGAAGGTGTTCCAGGGCAACCAGGACAGCTTC |
| | ACCCCTGTGGTGAACAGCCTGGACCCCCCCCTGCTGACCAGATACCTGAGGATTCACCCCCAGAGCTGGGTGCACCAGATTGCCCTGAGGATGGAGGT |
| | GCTGGGCTGTGAGGCCCAGGACCTGTACTGAAATAAAAGATCTTTATTTTCATTAGATCTGTGTGTTGGTTTTTTGTGTGTCTAGAGCATGGCTACGT |
| | AGATAAGTAGCATGGCGGGTTAATCATTAACTACACCTGCAGGAGGAACCCCTAGTGATGGAGTTGGCCACTCCCTCTCTGCGCGCTCGCTCGCTCAC |
| | TGAGGCCGGGCGACCAAAGGTCGCCCGACGCCCGGGCGGCCTCAGTGAGCGAGCGAGCGCGCAGCTGCCTGCAGGGGCGCGCCTCGAGGCATGCGGTA |
| | CCAAGCTTGTCGAGAAGTACTAGAGGATCATAATCAGCCATACCACATTTGTAGAGGTTTTACTTGCTTTAAAAAACCTCCCACACCTCCCCCTGAAC |
| | CTGAAACATAAAATGAATGCAATTGTTGTTGTTAACTTGTTTATTGCAGCTTATAATGGTTACAAATAAAGCAATAGCATCACAAATTTCACAAATAA |
| | AGCATTTTTTTCACTGCATTCTAGTTGTGGTTTGTCCAAACTCATCAATGTATCTTATCATGTCTGGATCTGATCACTGATATCGCCTAGGAGATCCG |
| | AACCAGATAAGTGAAATCTAGTTCCAAACTATTTTGTCATTTTTAATTTTCGTATTAGCTTACGACGCTACACCCAGTTCCCATCTATTTTGTCACTC |
| | TTCCCTAAATAATCCTTAAAAACTCCATTTCCACCCCTCCCAGTTCCCAACTATTTTGTCCGCCCACAGCGGGGCATTTTTCTTCCTGTTATGTTTTT |
| | AATCAAACATCCTGCCAACTCCATGTGACAAACCGTCATCTTCGGCTACTTTTTCTCTGTCACAGAATGAAAATTTTTCTGTCATCTCTTCGTTATTA |
| | ATGTTTGTAATTGACTGAATATCAACGCTTATTTGCAGCCTGAATGGCGAATGGGACGCGCCCTGTAGCGGCGCATTAAGCGCGGCGGGTGTGGTGGT |
| | TACGCGCAGCGTGACCGCTACACTTGCCAGCGCCCTAGCGCCCGCTCCTTTCGCTTTCTTCCCTTCCTTTCTCGCCACGTTCGCCGGCTTTCCCCGTC |
| | AAGCTCTAAATCGGGGGCTCCCTTTAGGGTTCCGATTTAGTGCTTTACGGCACCTCGACCCCAAAAAACTTGATTAGGGTGATGGTTCACGTAGTGGG |
| | CCATCGCCCTGATAGACGGTTTTTCGCCCTTTGACGTTGGAGTCCACGTTCTTTAATAGTGGACTCTTGTTCCAAACTGGAACAACACTCAACCCTAT |
| | CTCGGTCTATTCTTTTGATTTATAAGGGATTTTGCCGATTTCGGCCTATTGGTTAAAAAATGAGCTGATTTAACAAAAATTTAACGCGAATTTTAACA |
| | AAATATTAACGTTTACAATTTCAGGTGGCACTTTTCGGGGAAATGTGCGCGGAACCCCTATTTGTTTATTTTTCTAAATACATTCAAATATGTATCCG |
| | CTCATGAGACAATAACCCTGATAAATGCTTCAATAATATTGAAAAAGGAAGAGTATGAGTATTCAACATTTCCGTGTCGCCCTTATTCCCTTTTTTGC |
| | GGCATTTTGCCTTCCTGTTTTTGCTCACCCAGAAACGCTGGTGAAAGTAAAAGATGCTGAAGATCAGTTGGGTGCACGAGTGGGTTACATCGAACTGG |
| | ATCTCAACAGCGGTAAGATCCTTGAGAGTTTTCGCCCCGAAGAACGTTTTCCAATGATGAGCACTTTTAAAGTTCTGCTATGTGGCGCGGTATTATCC |
| | CGTATTGACGCCGGGCAAGAGCAACTCGGTCGCCGCATACACTATTCTCAGAATGACTTGGTTGAGTACTCACCAGTCACAGAAAAGCATCTTACGGA |
| | TGGCATGACAGTAAGAGAATTATGCAGTGCTGCCATAACCATGAGTGATAACACTGCGGCCAACTTACTTCTGACAACGATCGGAGGACCGAAGGAGC |
| | TAACCGCTTTTTTGCACAACATGGGGGATCATGTAACTCGCCTTGATCGTTGGGAACCGGAGCTGAATGAAGCCATACCAAACGACGAGCGTGACACC |
| | ACGATGCCTGTAGCAATGGCAACAACGTTGCGCAAACTATTAACTGGCGAACTACTTACTCTAGCTTCCCGGCAACAATTAATAGACTGGATGGAGGC |
| | GGATAAAGTTGCAGGACCACTTCTGCGCTCGGCCCTTCCGGCTGGCTGGTTTATTGCTGATAAATCTGGAGCCGGTGAGCGTGGGTCTCGCGGTATCA |
| | TTGCAGCACTGGGGCCAGATGGTAAGCCCTCCCGTATCGTAGTTATCTACACGACGGGGAGTCAGGCAACTATGGATGAACGAAATAGACAGATCGCT |
| | GAGATAGGTGCCTCACTGATTAAGCATTGGTAACTGTCAGACCAAGTTTACTCATATATACTTTAGATTGATTTAAAACTTCATTTTTAATTTAAAAG |
| | GATCTAGGTGAAGATCCTTTTTGATAATCTCATGACCAAAATCCCTTAACGTGAGTTTTCGTTCCACTGAGCGTCAGACCCCGTAGAAAAGATCAAAG |
| | GATCTTCTTGAGATCCTTTTTTTCTGCGCGTAATCTGCTGCTTGCAAACAAAAAAACCACCGCTACCAGCGGTGGTTTGTTTGCCGGATCAAGAGCTA |
| | CCAACTCTTTTTCCGAAGGTAACTGGCTTCAGCAGAGCGCAGATACCAAATACTGTCCTTCTAGTGTAGCCGTAGTTAGGCCACCACTTCAAGAACTC |
| | TGTAGCACCGCCTACATACCTCGCTCTGCTAATCCTGTTACCAGTGGCTGCTGCCAGTGGCGATAAGTCGTGTCTTACCGGGTTGGACTCAAGACGAT |
| | AGTTACCGGATAAGGCGCAGCGGTCGGGCTGAACGGGGGGTTCGTGCACACAGCCCAGCTTGGAGCGAACGACCTACACCGAACTGAGATACCTACAG |
| | CGTGAGCATTGAGAAAGCGCCACGCTTCCCGAAGGGAGAAAGGCGGACAGGTATCCGGTAAGCGGCAGGGTCGGAACAGGAGAGCGCACGAGGGAGCT |
| | TCCAGGGGGAAACGCCTGGTATCTTTATAGTCCTGTCGGGTTTCGCCACCTCTGACTTGAGCGTCGATTTTTGTGATGCTCGTCAGGGGGGCGGAGCC |
| | TATGGAAAAACGCCAGCAACGCGGCCTTTTTACGGTTCCTGGCCTTTTGCTGGCCTTTTGCTCACATGTTCTTTCCTGCGTTATCCCCTGATTCTGTG |
| | GATAACCGTATTACCGCCTTTGAGTGAGCTGATACCGCTCGCCGCAGCCGAACGACCGAGCGCAGCGAGTCAGTGAGCGAGGAAGCGGAAGAGCGCCT |
| | GATGCGGTATTTTCTCCTTACGCATCTGTGCGGTATTTCACACCGCAGACCAGCCGCGTAACCTGGCAAAATCGGTTACGGTTGAGTAATAAATGGAT |
| | GCCCTGCGTAAGCGGGTGTGGGCGGACAATAAAGTCTTAAACTGAACAAAATAGATCTAAACTATGACAATAAAGTCTTAAACTAGACAGAATAGTTG |
| | TAAACTGAAATCAGTCCAGTTATGCTGTGAAAAAGCATACTGGACTTTTGTTATGGCTAAAGCAAACTCTTCATTTTCTGAAGTGCAAATTGCCCGTC |
| | GTATTAAAGAGGGGCGTGGCCAAGGGCATGGTAAAGACTATATTCGCGGCGTTGTGACAATTTACCGAACAACTCCGCGGCCGGGAAGCCGATCTCGG |
| | CTTGAACGAATTGTTAGGTGGCGGTACTTGGGTCGATATCAAAGTGCATCACTTCTTCCCGTATGCCCAACTTTGTATAGAGAGCCACTGCGGGATCG |
| | TCACCGTAATCTGCTTGCACGTAGATCACATAAGCACCAAGCGCGTTGGCCTCATGCTTGAGGAGATTGATGAGCGCGGTGGCAATGCCCTGCCTCCG |
| | GTGCTCGCCGGAGACTGCGAGATCATAGATATAGATCTCACTACGCGGCTGCTCAAACCTGGGCAGAACGTAAGCCGCGAGAGCGCCAACAACCGCTT |
| | CTTGGTCGAAGGCAGCAAGCGCGATGAATGTCTTACTACGGAGCAAGTTCCCGAGGTAATCGGAGTCCGGCTGATGTTGGGAGTAGGTGGCTACGTCT |
| | CCGAACTCACGACCGAAAAGATCAAGAGCAGCCCGCATGGATTTGACTTGGTCAGGGCCGAGCCTACATGTGCGAATGATGCCCATACTTGAGCCACC |
| | TAACTTTGTTTTAGGGCGACTGCCCTGCTGCGTAACATCGTTGCTGCTGCGTAACATCGTTGCTGCTCCATAACATCAAACATCGACCCACGGCGTAA |
| | CGCGCTTGCTGCTTGGATGCCCGAGGCATAGACTGTACAAAAAAACAGTCATAACAAGCCATGAAAACCGCCACTGCGCCGTTACCACCGCTGCGTTC |
| | GGTCAAGGTTCTGGACCAGTTGCGTGAGCGCATACGCTACTTGCATTACAGTTTACGAACCGAACAGGCTTATGTCAACTGGGTTCGTGCCTTCATCC |
| | GTTTCCACGGTGTGCGTCACCCGGCAACCTTGGGCAGCAGCGAAGTCGAGGCATTTCTGTCCTGGCTGGCGAACGAGCGCAAGGTTTCGGTCTCCACG |
| | CATCGTCAGGCATTGGCGGCCTTGCTGTTCTTCTACGGCAAGGTGCTGTGCACGGATCTGCCCTGGCTTCAGGAGATCGGAAGACCTCGGCCGTCGCG |
| | GCGCTTGCCGGTGGTGCTGACCCCGGATGAAGTGGTTCGCATCCTCGGTTTTCTGGAAGGCGAGCATCGTTTGTTCGCCCAGGACTCTAGCTATAGTT |
| | CTAGTGGTTGGCTACGTATACTCCGGAATATTAATAGATCATGGAGATAATTAAAATGATAACCATCTCGCAAATAAATAAGTATTTTACTGTTTTCG |
| | TAACAGTTTTGTAATAAAAAAACCTATAAATATTCCGGATTATTCATACCGTCCCACCATCGGGCGCGGATCTCGGTCCGAAACCATGTCGTACTACC |
| | ATCACCATCACCATCACGATTACGATATCCCAACGACCGAAAACCTGTATTTTCAGGGCGCCATGGGATCC |
| ceDNAFVIII- | GGCCGGCCCCTGCAGGCAGCTGCGCGCTCGCTCGCTCACTGAGGCCGCCCGGGCAAAGCCCGGGCGTCGGGCGACCTTTGGTCGCCCGGCCTCAGTGA |
| vector 13 | GCGAGCGAGCGCGCAGAGAGGGAGTGGCCAACTCCATCACTAGGGGTTCCTTGTAGTTAATGATTAACCCGCCATGCTACTTATCTACGTAGCCATGC |
| (SEQ ID NO: | TCTAGAGTCTGTCTGCACATTTCGTAGAGCGAGTGTTCCGATACTCTAATCTCCCTAGGCAAGGTTCATATTGACTTAGGTTACTTATTCTCCTTTTG |
| 204) | TTGACTAAGTCAATAATCAGAATCAGCAGGTTTGGAGTCAGCTTGGCAGGGATCAGCAGCCTGGGTTGGAAGGAGGGGGTATAAAAGCCCCTTCACCA |
| | GGAGAAGCCGTCACACAGATCCACAAGCTCCTGCTAGCAGGTAAGTGCCGTGTGTGGTTCCCGCGGGCCTGGCCTCTTTACGGGTTATGGCCCTTGCG |
| | TGCCTTGAATTACTGACACTGACATCCACTTTTTCTTTTTCTCCACAGGTTTAAACGCCACCATGCAGATTGAGCTGAGCACCTGCTTCTTCCTGTGT |
| | CTGCTGAGGTTCTGCTTCTCTGCCACCAGGAGGTATTACCTGGGGGCTGTGGAGCTGAGCTGGGACTATATGCAGTCTGACCTGGGGGAGCTGCCTGT |
| | GGATGCTAGGTTCCCCCCCAGGGTGCCCAAGAGCTTCCCCTTTAACACTTCTGTGGTGTACAAGAAGACCCTGTTTGTGGAGTTCACTGACCACCTGT |
| | TCAACATTGCCAAGCCCAGGCCCCCCTGGATGGGGCTGCTGGGGCCCACCATCCAGGCTGAGGTGTATGACACTGTGGTGATCACCCTGAAGAACATG |
| | GCCAGCCACCCTGTGAGCCTGCATGCTGTGGGGGTGAGCTACTGGAAGGCTTCTGAGGGGGCTGAGTATGATGACCAGACTAGCCAGAGGGAGAAGGA |
| | GGATGACAAGGTGTTTCCTGGGGGCAGCCATACCTATGTGTGGCAGGTGCTGAAGGAGAATGGCCCCATGGCCTCTGACCCCCTGTGCCTGACCTACA |
| | GCTACCTGTCTCATGTGGACCTGGTGAAGGACCTGAACTCTGGCCTGATTGGGGCTCTGCTGGTGTGTAGGGAGGGCAGCCTGGCTAAGGAAAAGACC |
| | CAGACCCTGCATAAGTTTATCCTGCTGTTTGCTGTGTTTGATGAGGGCAAGAGCTGGCACTCTGAGACCAAGAACAGCCTGATGCAGGATAGGGATGC |
| | TGCCTCTGCCAGGGCTTGGCCTAAGATGCACACTGTGAATGGGTATGTGAATAGGAGCCTGCCTGGCCTGATTGGCTGCCACAGGAAGTCTGTGTACT |
| | GGCATGTGATTGGGATGGGCACCACCCCTGAGGTCCATAGCATCTTCCTGGAGGGCCACACTTTCCTGGTGAGGAACCACAGACAGGCCTCTCTGGAG |
| | ATCTCTCCCATCACCTTCCTGACTGCTCAGACTCTGCTGATGGACCTGGGCCAGTTCCTGCTGTTTTGCCATATTAGCAGCCACCAGCATGATGGGAT |
| | GGAGGCCTATGTGAAGGTGGATAGCTGCCCTGAGGAGCCTCAGCTGAGGATGAAGAACAATGAGGAGGCTGAAGACTATGATGATGACCTGACTGATT |
| | CTGAGATGGATGTGGTGAGGTTTGATGATGACAATAGCCCCAGCTTCATTCAGATCAGGTCTGTGGCCAAGAAACACCCCAAGACCTGGGTGCACTAC |
| | ATTGCTGCTGAGGAAGAGGACTGGGACTATGCTCCCCTGGTGCTGGCCCCTGATGATAGGTCTTATAAGAGCCAGTACCTGAACAATGGGCCCCAGAG |
| | GATTGGCAGGAAGTACAAGAAGGTGAGGTTCATGGCCTACACTGATGAAACCTTCAAAACCAGGGAGGCCATTCAGCATGAGTCTGGCATCCTGGGCC |
| | CTCTGCTGTATGGGGAGGTGGGGGACACCCTGCTGATCATCTTCAAGAACCAGGCCAGCAGGCCCTACAACATCTATCCTCATGGCATCACTGATGTG |
| | AGGCCCCTGTACAGCAGGAGGCTGCCCAAGGGGGTGAAGCACCTGAAAGACTTCCCCATCCTGCCTGGGGAGATCTTTAAGTATAAGTGGACTGTGAC |
| | TGTGGAGGATGGCCCTACCAAGTCTGACCCCAGGTGTCTGACCAGGTACTATTCTAGCTTTGTGAACATGGAGAGGGACCTGGCCTCTGGCCTGATTG |
| | GGCCCCTGCTGATCTGCTACAAGGAGTCTGTGGACCAGAGGGGCAACCAGATCATGTCTGACAAGAGGAATGTGATCCTGTTTTCTGTGTTTGATGAG |
| | AATAGGAGCTGGTACCTGACTGAGAACATCCAGAGGTTTCTGCCCAATCCTGCTGGGGTGCAGCTGGAGGATCCTGAGTTCCAGGCCAGCAATATCAT |
| | GCATAGCATCAATGGCTATGTGTTTGACAGCCTGCAGCTGTCTGTGTGCCTGCATGAGGTGGCCTACTGGTACATCCTGAGCATTGGGGCCCAGACTG |
| | ACTTTCTGTCTGTGTTCTTTTCTGGCTATACCTTCAAGCACAAGATGGTGTATGAGGATACCCTGACCCTGTTCCCCTTCTCTGGGGAGACTGTGTTC |
| | ATGAGCATGGAGAATCCTGGGCTGTGGATCCTGGGGTGCCACAACTCTGATTTTAGGAACAGGGGGATGACTGCCCTGCTGAAGGTGTCTAGCTGTGA |
| | TAAGAACACTGGGGACTACTATGAGGACAGCTATGAGGACATTTCTGCTTATCTGCTGTCTAAGAATAATGCCATTGAGCCCAGAAGCTTCAGCCAGA |
| | ATCCCCCTGTGCTGAAGAGACATCAGAGGGAGATCACCAGAACTACCCTGCAGTCTGATCAGGAGGAGATTGACTATGATGACACTATCTCTGTGGAG |
| | ATGAAGAAGGAGGACTTTGACATCTATGATGAGGATGAGAATCAGTCTCCCAGGAGCTTTCAGAAGAAGACCAGACATTACTTCATTGCTGCTGTGGA |
| | GAGGCTGTGGGACTATGGCATGAGCTCTAGCCCTCATGTGCTGAGGAACAGGGCCCAGTCTGGCTCTGTGCCCCAGTTCAAGAAGGTGGTGTTCCAGG |
| | AATTCACTGATGGCAGCTTCACCCAGCCCCTGTACAGGGGGGAGCTGAATGAGCACCTGGGCCTGCTGGGGCCTTATATCAGGGCTGAGGTGGAGGAT |
| | AATATTATGGTGACTTTCAGGAACCAGGCCAGCAGGCCCTACTCTTTCTATAGCAGCCTGATCTCTTATGAGGAGGATCAGAGGCAGGGGGCTGAGCC |
| | TAGGAAGAACTTTGTGAAGCCCAATGAGACTAAGACCTACTTCTGGAAGGTCCAGCACCACATGGCCCCTACCAAGGATGAGTTTGACTGCAAGGCCT |
| | GGGCCTATTTCTCTGATGTGGATCTGGAGAAGGATGTCCATTCTGGGCTGATTGGCCCCCTGCTGGTGTGCCACACTAACACTCTGAATCCTGCCCAT |
| | GGCAGGCAGGTGACTGTCCAGGAGTTTGCCCTGTTCTTCACTATCTTTGATGAGACCAAGAGCTGGTACTTTACTGAGAACATGGAGAGGAACTGCAG |
| | AGCTCCTTGCAATATTCAGATGGAGGACCCCACCTTCAAGGAGAATTACAGGTTCCATGCCATTAATGGGTACATCATGGACACCCTGCCTGGCCTGG |
| | TGATGGCTCAGGACCAGAGGATCAGGTGGTACCTGCTGAGCATGGGCTCTAATGAGAATATCCACAGCATCCACTTCTCTGGGCATGTGTTCACTGTG |
| | AGGAAGAAGGAGGAGTACAAGATGGCTCTGTATAATCTGTACCCTGGGGTGTTTGAAACTGTGGAGATGCTGCCCTCTAAGGCTGGCATCTGGAGGGT |
| | GGAGTGCCTGATTGGGGAGCACCTGCATGCTGGCATGAGCACCCTGTTCCTGGTGTACAGCAACAAGTGCCAGACCCCCCTGGGCATGGCCTCTGGCC |
| | ACATCAGGGACTTCCAGATCACTGCCTCTGGCCAGTATGGCCAGTGGGCCCCCAAGCTGGCCAGGCTGCACTATTCTGGCAGCATCAATGCCTGGAGC |
| | ACCAAGGAGCCCTTCAGCTGGATCAAGGTGGACCTGCTGGCCCCCATGATCATTCATGGCATCAAGACCCAGGGGGCCAGGCAGAAGTTCAGCTCTCT |
| | GTACATCTCTCAGTTCATCATCATGTACTCTCTGGATGGGAAGAAGTGGCAGACCTACAGGGGCAACAGCACTGGCACCCTGATGGTGTTCTTTGGGA |
| | ATGTGGACTCTTCTGGCATCAAGCACAACATCTTCAATCCCCCCATCATTGCTAGGTATATTAGGCTGCATCCCACCCACTACAGCATCAGGTCTACC |
| | CTGAGGATGGAGCTGATGGGCTGTGACCTGAACTCTTGCAGCATGCCCCTGGGCATGGAGTCTAAGGCCATCTCTGATGCCCAGATTACTGCCAGCAG |
| | CTACTTCACCAACATGTTTGCCACCTGGAGCCCCTCTAAGGCCAGGCTGCATCTGCAGGGGAGGAGCAATGCCTGGAGGCCTCAGGTGAACAACCCCA |
| | AGGAGTGGCTGCAGGTGGATTTCCAGAAGACCATGAAGGTGACTGGGGTGACCACCCAGGGGGTCAAGAGCCTGCTGACCAGCATGTATGTGAAGGAG |
| | TTCCTGATCAGCAGCAGCCAGGATGGCCACCAGTGGACTCTGTTCTTTCAGAATGGGAAGGTGAAGGTGTTTCAGGGCAATCAGGACTCTTTCACCCC |
| | TGTGGTGAACAGCCTGGACCCCCCCCTGCTGACCAGATACCTGAGGATCCACCCCCAGTCTTGGGTGCATCAGATTGCCCTGAGGATGGAGGTGCTGG |
| | GCTGTGAGGCTCAGGATCTGTACTGAGCGGCCGCAATAAAAGATCAGAGCTCTAGAGATCTGTGTGTTGGTTTTTTGTGTTCTAGAGCATGGCTACGT |
| | AGATAAGTAGCATGGCGGGTTAATCATTAACTACACCTGCAGGAGGAACCCCTAGTGATGGAGTTGGCCACTCCCTCTCTGCGCGCTCGCTCGCTCAC |
| | TGAGGCCGGGCGACCAAAGGTCGCCCGACGCCCGGGCGGCCTCAGTGAGCGAGCGAGCGCGCAGCTGCCTGCAGGGGCGCGCCTCGAGGCATGCGGTA |
| | CCAAGCTTGTCGAGAAGTACTAGAGGATCATAATCAGCCATACCACATTTGTAGAGGTTTTACTTGCTTTAAAAAACCTCCCACACCTCCCCCTGAAC |
| | CTGAAACATAAAATGAATGCAATTGTTGTTGTTAACTTGTTTATTGCAGCTTATAATGGTTACAAATAAAGCAATAGCATCACAAATTTCACAAATAA |
| | AGCATTTTTTTCACTGCATTCTAGTTGTGGTTTGTCCAAACTCATCAATGTATCTTATCATGTCTGGATCTGATCACTGATATCGCCTAGGAGATCCG |
| | AACCAGATAAGTGAAATCTAGTTCCAAACTATTTTGTCATTTTTAATTTTCGTATTAGCTTACGACGCTACACCCAGTTCCCATCTATTTTGTCACTC |
| | TTCCCTAAATAATCCTTAAAAACTCCATTTCCACCCCTCCCAGTTCCCAACTATTTTGTCCGCCCACAGCGGGGCATTTTTCTTCCTGTTATGTTTTT |
| | AATCAAACATCCTGCCAACTCCATGTGACAAACCGTCATCTTCGGCTACTTTTTCTCTGTCACAGAATGAAAATTTTTCTGTCATCTCTTCGTTATTA |
| | ATGTTTGTAATTGACTGAATATCAACGCTTATTTGCAGCCTGAATGGCGAATGGGACGCGCCCTGTAGCGGCGCATTAAGCGCGGCGGGTGTGGTGGT |
| | TACGCGCAGCGTGACCGCTACACTTGCCAGCGCCCTAGCGCCCGCTCCTTTCGCTTTCTTCCCTTCCTTTCTCGCCACGTTCGCCGGCTTTCCCCGTC |
| | AAGCTCTAAATCGGGGGCTCCCTTTAGGGTTCCGATTTAGTGCTTTACGGCACCTCGACCCCAAAAAACTTGATTAGGGTGATGGTTCACGTAGTGGG |
| | CCATCGCCCTGATAGACGGTTTTTCGCCCTTTGACGTTGGAGTCCACGTTCTTTAATAGTGGACTCTTGTTCCAAACTGGAACAACACTCAACCCTAT |
| | CTCGGTCTATTCTTTTGATTTATAAGGGATTTTGCCGATTTCGGCCTATTGGTTAAAAAATGAGCTGATTTAACAAAAATTTAACGCGAATTTTAACA |
| | AAATATTAACGTTTACAATTTCAGGTGGCACTTTTCGGGGAAATGTGCGCGGAACCCCTATTTGTTTATTTTTCTAAATACATTCAAATATGTATCCG |
| | CTCATGAGACAATAACCCTGATAAATGCTTCAATAATATTGAAAAAGGAAGAGTATGAGTATTCAACATTTCCGTGTCGCCCTTATTCCCTTTTTTGC |
| | GGCATTTTGCCTTCCTGTTTTTGCTCACCCAGAAACGCTGGTGAAAGTAAAAGATGCTGAAGATCAGTTGGGTGCACGAGTGGGTTACATCGAACTGG |
| | ATCTCAACAGCGGTAAGATCCTTGAGAGTTTTCGCCCCGAAGAACGTTTTCCAATGATGAGCACTTTTAAAGTTCTGCTATGTGGCGCGGTATTATCC |
| | CGTATTGACGCCGGGCAAGAGCAACTCGGTCGCCGCATACACTATTCTCAGAATGACTTGGTTGAGTACTCACCAGTCACAGAAAAGCATCTTACGGA |
| | TGGCATGACAGTAAGAGAATTATGCAGTGCTGCCATAACCATGAGTGATAACACTGCGGCCAACTTACTTCTGACAACGATCGGAGGACCGAAGGAGC |
| | TAACCGCTTTTTTGCACAACATGGGGGATCATGTAACTCGCCTTGATCGTTGGGAACCGGAGCTGAATGAAGCCATACCAAACGACGAGCGTGACACC |
| | ACGATGCCTGTAGCAATGGCAACAACGTTGCGCAAACTATTAACTGGCGAACTACTTACTCTAGCTTCCCGGCAACAATTAATAGACTGGATGGAGGC |
| | GGATAAAGTTGCAGGACCACTTCTGCGCTCGGCCCTTCCGGCTGGCTGGTTTATTGCTGATAAATCTGGAGCCGGTGAGCGTGGGTCTCGCGGTATCA |
| | TTGCAGCACTGGGGCCAGATGGTAAGCCCTCCCGTATCGTAGTTATCTACACGACGGGGAGTCAGGCAACTATGGATGAACGAAATAGACAGATCGCT |
| | GAGATAGGTGCCTCACTGATTAAGCATTGGTAACTGTCAGACCAAGTTTACTCATATATACTTTAGATTGATTTAAAACTTCATTTTTAATTTAAAAG |
| | GATCTAGGTGAAGATCCTTTTTGATAATCTCATGACCAAAATCCCTTAACGTGAGTTTTCGTTCCACTGAGCGTCAGACCCCGTAGAAAAGATCAAAG |
| | GATCTTCTTGAGATCCTTTTTTTCTGCGCGTAATCTGCTGCTTGCAAACAAAAAAACCACCGCTACCAGCGGTGGTTTGTTTGCCGGATCAAGAGCTA |
| | CCAACTCTTTTTCCGAAGGTAACTGGCTTCAGCAGAGCGCAGATACCAAATACTGTCCTTCTAGTGTAGCCGTAGTTAGGCCACCACTTCAAGAACTC |
| | TGTAGCACCGCCTACATACCTCGCTCTGCTAATCCTGTTACCAGTGGCTGCTGCCAGTGGCGATAAGTCGTGTCTTACCGGGTTGGACTCAAGACGAT |
| | AGTTACCGGATAAGGCGCAGCGGTCGGGCTGAACGGGGGGTTCGTGCACACAGCCCAGCTTGGAGCGAACGACCTACACCGAACTGAGATACCTACAG |
| | CGTGAGCATTGAGAAAGCGCCACGCTTCCCGAAGGGAGAAAGGCGGACAGGTATCCGGTAAGCGGCAGGGTCGGAACAGGAGAGCGCACGAGGGAGCT |
| | TCCAGGGGGAAACGCCTGGTATCTTTATAGTCCTGTCGGGTTTCGCCACCTCTGACTTGAGCGTCGATTTTTGTGATGCTCGTCAGGGGGGCGGAGCC |
| | TATGGAAAAACGCCAGCAACGCGGCCTTTTTACGGTTCCTGGCCTTTTGCTGGCCTTTTGCTCACATGTTCTTTCCTGCGTTATCCCCTGATTCTGTG |
| | GATAACCGTATTACCGCCTTTGAGTGAGCTGATACCGCTCGCCGCAGCCGAACGACCGAGCGCAGCGAGTCAGTGAGCGAGGAAGCGGAAGAGCGCCT |
| | GATGCGGTATTTTCTCCTTACGCATCTGTGCGGTATTTCACACCGCAGACCAGCCGCGTAACCTGGCAAAATCGGTTACGGTTGAGTAATAAATGGAT |
| | GCCCTGCGTAAGCGGGTGTGGGCGGACAATAAAGTCTTAAACTGAACAAAATAGATCTAAACTATGACAATAAAGTCTTAAACTAGACAGAATAGTTG |
| | TAAACTGAAATCAGTCCAGTTATGCTGTGAAAAAGCATACTGGACTTTTGTTATGGCTAAAGCAAACTCTTCATTTTCTGAAGTGCAAATTGCCCGTC |
| | GTATTAAAGAGGGGCGTGGCCAAGGGCATGGTAAAGACTATATTCGCGGCGTTGTGACAATTTACCGAACAACTCCGCGGCCGGGAAGCCGATCTCGG |
| | CTTGAACGAATTGTTAGGTGGCGGTACTTGGGTCGATATCAAAGTGCATCACTTCTTCCCGTATGCCCAACTTTGTATAGAGAGCCACTGCGGGATCG |
| | TCACCGTAATCTGCTTGCACGTAGATCACATAAGCACCAAGCGCGTTGGCCTCATGCTTGAGGAGATTGATGAGCGCGGTGGCAATGCCCTGCCTCCG |
| | GTGCTCGCCGGAGACTGCGAGATCATAGATATAGATCTCACTACGCGGCTGCTCAAACCTGGGCAGAACGTAAGCCGCGAGAGCGCCAACAACCGCTT |
| | CTTGGTCGAAGGCAGCAAGCGCGATGAATGTCTTACTACGGAGCAAGTTCCCGAGGTAATCGGAGTCCGGCTGATGTTGGGAGTAGGTGGCTACGTCT |
| | CCGAACTCACGACCGAAAAGATCAAGAGCAGCCCGCATGGATTTGACTTGGTCAGGGCCGAGCCTACATGTGCGAATGATGCCCATACTTGAGCCACC |
| | TAACTTTGTTTTAGGGCGACTGCCCTGCTGCGTAACATCGTTGCTGCTGCGTAACATCGTTGCTGCTCCATAACATCAAACATCGACCCACGGCGTAA |
| | CGCGCTTGCTGCTTGGATGCCCGAGGCATAGACTGTACAAAAAAACAGTCATAACAAGCCATGAAAACCGCCACTGCGCCGTTACCACCGCTGCGTTC |
| | GGTCAAGGTTCTGGACCAGTTGCGTGAGCGCATACGCTACTTGCATTACAGTTTACGAACCGAACAGGCTTATGTCAACTGGGTTCGTGCCTTCATCC |
| | GTTTCCACGGTGTGCGTCACCCGGCAACCTTGGGCAGCAGCGAAGTCGAGGCATTTCTGTCCTGGCTGGCGAACGAGCGCAAGGTTTCGGTCTCCACG |
| | CATCGTCAGGCATTGGCGGCCTTGCTGTTCTTCTACGGCAAGGTGCTGTGCACGGATCTGCCCTGGCTTCAGGAGATCGGAAGACCTCGGCCGTCGCG |
| | GCGCTTGCCGGTGGTGCTGACCCCGGATGAAGTGGTTCGCATCCTCGGTTTTCTGGAAGGCGAGCATCGTTTGTTCGCCCAGGACTCTAGCTATAGTT |
| | CTAGTGGTTGGCTACGTATACTCCGGAATATTAATAGATCATGGAGATAATTAAAATGATAACCATCTCGCAAATAAATAAGTATTTTACTGTTTTCG |
| | TAACAGTTTTGTAATAAAAAAACCTATAAATATTCCGGATTATTCATACCGTCCCACCATCGGGCGCGGATCTCGGTCCGAAACCATGTCGTACTACC |
| | ATCACCATCACCATCACGATTACGATATCCCAACGACCGAAAACCTGTATTTTCAGGGCGCCATGGGATCC |
| ceDNAFVIII- | GGCCGGCCCCTGCAGGCAGCTGCGCGCTCGCTCGCTCACTGAGGCCGCCCGGGCAAAGCCCGGGCGTCGGGCGACCTTTGGTCGCCCGGCCTCAGTGA |
| vector 14 | GCGAGCGAGCGCGCAGAGAGGGAGTGGCCAACTCCATCACTAGGGGTTCCTTGTAGTTAATGATTAACCCGCCATGCTACTTATCTACGTAGCCATGC |
| (SEQ ID NO: | TCTAGAGGAACCATTGCCACCTTCAGGGGGAGGCTGCTGGTGAATATTAACCAAGATCACCCCAGTTACCGGAGGAGCAAACAGGGACTAAGTTCACA |
| 205) | CGCGTGGTACCGTCTGTCTGCACATTTCGTAGAGCGAGTGTTCCGATACTCTAATCTCCCTAGGCAAGGTTCATATTTGTGTAGGTTACTTATTCTCC |
| | TTTTGTTGACTAAGTCAATAATCAGAATCAGCAGGTTTGGAGTCAGCTTGGCAGGGATCAGCAGCCTGGGTTGGAAGGAGGGGGTATAAAAGCCCCTT |
| | CACCAGGAGAAGCCGTCACACAGATCCACAAGCTCCTGAAGAGGTAAGGGTTTAAGTTATCGTTAGTTCGTGCACCATTAATGTTTAATTACCTGGAG |
| | CACCTGCCTGAAATCATTTTTTTTTCAGGTTGGCTAGTATGCAGATCGAGCTCTCCACCTGCTTCTTTCTGTGCCTGTTGAGATTCTGCTTCAGCGCC |
| | ACCAGGAGATACTACCTGGGGGCTGTGGAGCTGAGCTGGGACTACATGCAGTCTGACCTGGGGGAGCTGCCTGTGGATGCCAGGTTCCCCCCCAGAGT |
| | GCCCAAGAGCTTCCCCTTCAACACCTCTGTGGTGTACAAGAAGACCCTGTTTGTGGAGTTCACTGACCACCTGTTCAACATTGCCAAGCCCAGGCCCC |
| | CCTGGATGGGCCTGCTGGGCCCCACCATCCAGGCTGAGGTGTATGACACTGTGGTGATCACCCTGAAGAACATGGCCAGCCACCCTGTGAGCCTGCAT |
| | GCTGTGGGGGTGAGCTACTGGAAGGCCTCTGAGGGGGCTGAGTATGATGACCAGACCAGCCAGAGGGAGAAGGAGGATGACAAGGTGTTCCCTGGGGG |
| | CAGCCACACCTATGTGTGGCAGGTGCTGAAGGAGAATGGCCCCATGGCCTCTGACCCCCTGTGCCTGACCTACAGCTACCTGAGCCATGTGGACCTGG |
| | TGAAGGACCTGAACTCTGGCCTGATTGGGGCCCTGCTGGTGTGCAGGGAGGGCAGCCTGGCCAAGGAGAAGACCCAGACCCTGCACAAGTTCATCCTG |
| | CTGTTTGCTGTGTTTGATGAGGGCAAGAGCTGGCACTCTGAAACCAAGAACAGCCTGATGCAGGACAGGGATGCTGCCTCTGCCAGGGCCTGGCCCAA |
| | GATGCACACTGTGAATGGCTATGTGAACAGGAGCCTGCCTGGCCTGATTGGCTGCCACAGGAAGTCTGTGTACTGGCATGTGATTGGCATGGGCACCA |
| | CCCCTGAGGTGCACAGCATCTTCCTGGAGGGCCACACCTTCCTGGTCAGGAACCACAGGCAGGCCAGCCTGGAGATCAGCCCCATCACCTTCCTGACT |
| | GCCCAGACCCTGCTGATGGACCTGGGCCAGTTCCTGCTGTTCTGCCACATCAGCAGCCACCAGCATGATGGCATGGAGGCCTATGTGAAGGTGGACAG |
| | CTGCCCTGAGGAGCCCCAGCTGAGGATGAAGAACAATGAGGAGGCTGAGGACTATGATGATGACCTGACTGACTCTGAGATGGATGTGGTGAGGTTTG |
| | ATGATGACAACAGCCCCAGCTTCATCCAGATCAGGTCTGTGGCCAAGAAGCACCCCAAGACCTGGGTGCACTACATTGCTGCTGAGGAGGAGGACTGG |
| | GACTATGCCCCCCTGGTGCTGGCCCCTGATGACAGGAGCTACAAGAGCCAGTACCTGAACAATGGCCCCCAGAGGATTGGCAGGAAGTACAAGAAGGT |
| | CAGGTTCATGGCCTACACTGATGAAACCTTCAAGACCAGGGAGGCCATCCAGCATGAGTCTGGCATCCTGGGCCCCCTGCTGTATGGGGAGGTGGGGG |
| | ACACCCTGCTGATCATCTTCAAGAACCAGGCCAGCAGGCCCTACAACATCTACCCCCATGGCATCACTGATGTGAGGCCCCTGTACAGCAGGAGGCTG |
| | CCCAAGGGGGTGAAGCACCTGAAGGACTTCCCCATCCTGCCTGGGGAGATCTTCAAGTACAAGTGGACTGTGACTGTGGAGGATGGCCCCACCAAGTC |
| | TGACCCCAGGTGCCTGACCAGATACTACAGCAGCTTTGTGAACATGGAGAGGGACCTGGCCTCTGGCCTGATTGGCCCCCTGCTGATCTGCTACAAGG |
| | AGTCTGTGGACCAGAGGGGCAACCAGATCATGTCTGACAAGAGGAATGTGATCCTGTTCTCTGTGTTTGATGAGAACAGGAGCTGGTACCTGACTGAG |
| | AACATCCAGAGGTTCCTGCCCAACCCTGCTGGGGTGCAGCTGGAGGACCCTGAGTTCCAGGCCAGCAACATCATGCACAGCATCAATGGCTATGTGTT |
| | TGACAGCCTGCAGCTGTCTGTGTGCCTGCATGAGGTGGCCTACTGGTACATCCTGAGCATTGGGGCCCAGACTGACTTCCTGTCTGTGTTCTTCTCTG |
| | GCTACACCTTCAAGCACAAGATGGTGTATGAGGACACCCTGACCCTGTTCCCCTTCTCTGGGGAGACTGTGTTCATGAGCATGGAGAACCCTGGCCTG |
| | TGGATTCTGGGCTGCCACAACTCTGACTTCAGGAACAGGGGCATGACTGCCCTGCTGAAAGTCTCCAGCTGTGACAAGAACACTGGGGACTACTATGA |
| | GGACAGCTATGAGGACATCTCTGCCTACCTGCTGAGCAAGAACAATGCCATTGAGCCCAGGAGCTTCAGCCAGAATCCACCCGTCCTTAAGCGCCATC |
| | AGCGCGAGATCACCAGGACCACCCTGCAGTCTGACCAGGAGGAGATTGACTATGATGACACCATCTCTGTGGAGATGAAGAAGGAGGACTTTGACATC |
| | TACGACGAGGACGAGAACCAGAGCCCCAGGAGCTTCCAGAAGAAGACCAGGCACTACTTCATTGCTGCTGTGGAGAGGCTGTGGGACTATGGCATGAG |
| | CAGCAGCCCCCATGTGCTGAGGAACAGGGCCCAGTCTGGCTCTGTGCCCCAGTTCAAGAAGGTGGTGTTCCAGGAGTTCACTGATGGCAGCTTCACCC |
| | AGCCCCTGTACAGAGGGGAGCTGAATGAGCACCTGGGCCTGCTGGGCCCCTACATCAGGGCTGAGGTGGAGGACAACATCATGGTGACCTTCAGGAAC |
| | CAGGCCAGCAGGCCCTACAGCTTCTACAGCAGCCTGATCAGCTATGAGGAGGACCAGAGGCAGGGGGCTGAGCCCAGGAAGAACTTTGTGAAGCCCAA |
| | TGAAACCAAGACCTACTTCTGGAAGGTGCAGCACCACATGGCCCCCACCAAGGATGAGTTTGACTGCAAGGCCTGGGCCTACTTCTCTGATGTGGACC |
| | TGGAGAAGGATGTGCACTCTGGCCTGATTGGCCCCCTGCTGGTGTGCCACACCAACACCCTGAACCCTGCCCATGGCAGGCAGGTGACTGTGCAGGAG |
| | TTTGCCCTGTTCTTCACCATCTTTGATGAAACCAAGAGCTGGTACTTCACTGAGAACATGGAGAGGAACTGCAGGGCCCCCTGCAACATCCAGATGGA |
| | GGACCCCACCTTCAAGGAGAACTACAGGTTCCATGCCATCAATGGCTACATCATGGACACCCTGCCTGGCCTGGTGATGGCCCAGGACCAGAGGATCA |
| | GGTGGTACCTGCTGAGCATGGGCAGCAATGAGAACATCCACAGCATCCACTTCTCTGGCCATGTGTTCACTGTGAGGAAGAAGGAGGAGTACAAGATG |
| | GCCCTGTACAACCTGTACCCTGGGGTGTTTGAGACTGTGGAGATGCTGCCCAGCAAGGCTGGCATCTGGAGGGTGGAGTGCCTGATTGGGGAGCACCT |
| | GCATGCTGGCATGAGCACCCTGTTCCTGGTGTACAGCAACAAGTGCCAGACCCCCCTGGGCATGGCCTCTGGCCACATCAGGGACTTCCAGATCACTG |
| | CCTCTGGCCAGTATGGCCAGTGGGCCCCCAAGCTGGCCAGGCTGCACTACTCTGGCAGCATCAATGCCTGGAGCACCAAGGAGCCCTTCAGCTGGATC |
| | AAGGTGGACCTGCTGGCCCCCATGATCATCCATGGCATCAAGACCCAGGGGGCCAGGCAGAAGTTCAGCAGCCTGTACATCAGCCAGTTCATCATCAT |
| | GTACAGCCTGGATGGCAAGAAGTGGCAGACCTACAGGGGCAACAGCACTGGCACCCTGATGGTGTTCTTTGGCAATGTGGACAGCTCTGGCATCAAGC |
| | ACAACATCTTCAACCCCCCCATCATTGCCAGATACATCAGGCTGCACCCCACCCACTACAGCATCAGGAGCACCCTGAGGATGGAGCTGATGGGCTGT |
| | GACCTGAACAGCTGCAGCATGCCCCTGGGCATGGAGAGCAAGGCCATCTCTGATGCCCAGATCACTGCCAGCAGCTACTTCACCAACATGTTTGCCAC |
| | CTGGAGCCCCAGCAAGGCCAGGCTGCATCTGCAGGGCAGGAGCAATGCCTGGAGGCCCCAGGTCAACAACCCCAAGGAGTGGCTGCAGGTGGACTTCC |
| | AGAAGACCATGAAGGTGACTGGGGTGACCACCCAGGGGGTGAAGAGCCTGCTGACCAGCATGTATGTGAAGGAGTTCCTGATCAGCAGCAGCCAGGAT |
| | GGCCACCAGTGGACCCTGTTCTTCCAGAATGGCAAGGTGAAGGTGTTCCAGGGCAACCAGGACAGCTTCACCCCTGTGGTGAACAGCCTGGACCCCCC |
| | CCTGCTGACCAGATACCTGAGGATTCACCCCCAGAGCTGGGTGCACCAGATTGCCCTGAGGATGGAGGTGCTGGGCTGTGAGGCCCAGGACCTGTACT |
| | GAGGATCCAATAAAATATCTTTATTTTCATTACATCTGTGTGTTGGTTTTTTGTGTGTTTTCCTGTAACGATCGGGTCTAGAGCATGGCTACGTAGAT |
| | AAGTAGCATGGCGGGTTAATCATTAACTACACCTGCAGGAGGAACCCCTAGTGATGGAGTTGGCCACTCCCTCTCTGCGCGCTCGCTCGCTCACTGAG |
| | GCCGGGCGACCAAAGGTCGCCCGACGCCCGGGCGGCCTCAGTGAGCGAGCGAGCGCGCAGCTGCCTGCAGGGGCGCGCCTCGAGGCATGCGGTACCAA |
| | GCTTGTCGAGAAGTACTAGAGGATCATAATCAGCCATACCACATTTGTAGAGGTTTTACTTGCTTTAAAAAACCTCCCACACCTCCCCCTGAACCTGA |
| | AACATAAAATGAATGCAATTGTTGTTGTTAACTTGTTTATTGCAGCTTATAATGGTTACAAATAAAGCAATAGCATCACAAATTTCACAAATAAAGCA |
| | TTTTTTTCACTGCATTCTAGTTGTGGTTTGTCCAAACTCATCAATGTATCTTATCATGTCTGGATCTGATCACTGATATCGCCTAGGAGATCCGAACC |
| | AGATAAGTGAAATCTAGTTCCAAACTATTTTGTCATTTTTAATTTTCGTATTAGCTTACGACGCTACACCCAGTTCCCATCTATTTTGTCACTCTTCC |
| | CTAAATAATCCTTAAAAACTCCATTTCCACCCCTCCCAGTTCCCAACTATTTTGTCCGCCCACAGCGGGGCATTTTTCTTCCTGTTATGTTTTTAATC |
| | AAACATCCTGCCAACTCCATGTGACAAACCGTCATCTTCGGCTACTTTTTCTCTGTCACAGAATGAAAATTTTTCTGTCATCTCTTCGTTATTAATGT |
| | TTGTAATTGACTGAATATCAACGCTTATTTGCAGCCTGAATGGCGAATGGGACGCGCCCTGTAGCGGCGCATTAAGCGCGGCGGGTGTGGTGGTTACG |
| | CGCAGCGTGACCGCTACACTTGCCAGCGCCCTAGCGCCCGCTCCTTTCGCTTTCTTCCCTTCCTTTCTCGCCACGTTCGCCGGCTTTCCCCGTCAAGC |
| | TCTAAATCGGGGGCTCCCTTTAGGGTTCCGATTTAGTGCTTTACGGCACCTCGACCCCAAAAAACTTGATTAGGGTGATGGTTCACGTAGTGGGCCAT |
| | CGCCCTGATAGACGGTTTTTCGCCCTTTGACGTTGGAGTCCACGTTCTTTAATAGTGGACTCTTGTTCCAAACTGGAACAACACTCAACCCTATCTCG |
| | GTCTATTCTTTTGATTTATAAGGGATTTTGCCGATTTCGGCCTATTGGTTAAAAAATGAGCTGATTTAACAAAAATTTAACGCGAATTTTAACAAAAT |
| | ATTAACGTTTACAATTTCAGGTGGCACTTTTCGGGGAAATGTGCGCGGAACCCCTATTTGTTTATTTTTCTAAATACATTCAAATATGTATCCGCTCA |
| | TGAGACAATAACCCTGATAAATGCTTCAATAATATTGAAAAAGGAAGAGTATGAGTATTCAACATTTCCGTGTCGCCCTTATTCCCTTTTTTGCGGCA |
| | TTTTGCCTTCCTGTTTTTGCTCACCCAGAAACGCTGGTGAAAGTAAAAGATGCTGAAGATCAGTTGGGTGCACGAGTGGGTTACATCGAACTGGATCT |
| | CAACAGCGGTAAGATCCTTGAGAGTTTTCGCCCCGAAGAACGTTTTCCAATGATGAGCACTTTTAAAGTTCTGCTATGTGGCGCGGTATTATCCCGTA |
| | TTGACGCCGGGCAAGAGCAACTCGGTCGCCGCATACACTATTCTCAGAATGACTTGGTTGAGTACTCACCAGTCACAGAAAAGCATCTTACGGATGGC |
| | ATGACAGTAAGAGAATTATGCAGTGCTGCCATAACCATGAGTGATAACACTGCGGCCAACTTACTTCTGACAACGATCGGAGGACCGAAGGAGCTAAC |
| | CGCTTTTTTGCACAACATGGGGGATCATGTAACTCGCCTTGATCGTTGGGAACCGGAGCTGAATGAAGCCATACCAAACGACGAGCGTGACACCACGA |
| | TGCCTGTAGCAATGGCAACAACGTTGCGCAAACTATTAACTGGCGAACTACTTACTCTAGCTTCCCGGCAACAATTAATAGACTGGATGGAGGCGGAT |
| | AAAGTTGCAGGACCACTTCTGCGCTCGGCCCTTCCGGCTGGCTGGTTTATTGCTGATAAATCTGGAGCCGGTGAGCGTGGGTCTCGCGGTATCATTGC |
| | AGCACTGGGGCCAGATGGTAAGCCCTCCCGTATCGTAGTTATCTACACGACGGGGAGTCAGGCAACTATGGATGAACGAAATAGACAGATCGCTGAGA |
| | TAGGTGCCTCACTGATTAAGCATTGGTAACTGTCAGACCAAGTTTACTCATATATACTTTAGATTGATTTAAAACTTCATTTTTAATTTAAAAGGATC |
| | TAGGTGAAGATCCTTTTTGATAATCTCATGACCAAAATCCCTTAACGTGAGTTTTCGTTCCACTGAGCGTCAGACCCCGTAGAAAAGATCAAAGGATC |
| | TTCTTGAGATCCTTTTTTTCTGCGCGTAATCTGCTGCTTGCAAACAAAAAAACCACCGCTACCAGCGGTGGTTTGTTTGCCGGATCAAGAGCTACCAA |
| | CTCTTTTTCCGAAGGTAACTGGCTTCAGCAGAGCGCAGATACCAAATACTGTCCTTCTAGTGTAGCCGTAGTTAGGCCACCACTTCAAGAACTCTGTA |
| | GCACCGCCTACATACCTCGCTCTGCTAATCCTGTTACCAGTGGCTGCTGCCAGTGGCGATAAGTCGTGTCTTACCGGGTTGGACTCAAGACGATAGTT |
| | ACCGGATAAGGCGCAGCGGTCGGGCTGAACGGGGGGTTCGTGCACACAGCCCAGCTTGGAGCGAACGACCTACACCGAACTGAGATACCTACAGCGTG |
| | AGCATTGAGAAAGCGCCACGCTTCCCGAAGGGAGAAAGGCGGACAGGTATCCGGTAAGCGGCAGGGTCGGAACAGGAGAGCGCACGAGGGAGCTTCCA |
| | GGGGGAAACGCCTGGTATCTTTATAGTCCTGTCGGGTTTCGCCACCTCTGACTTGAGCGTCGATTTTTGTGATGCTCGTCAGGGGGGCGGAGCCTATG |
| | GAAAAACGCCAGCAACGCGGCCTTTTTACGGTTCCTGGCCTTTTGCTGGCCTTTTGCTCACATGTTCTTTCCTGCGTTATCCCCTGATTCTGTGGATA |
| | ACCGTATTACCGCCTTTGAGTGAGCTGATACCGCTCGCCGCAGCCGAACGACCGAGCGCAGCGAGTCAGTGAGCGAGGAAGCGGAAGAGCGCCTGATG |
| | CGGTATTTTCTCCTTACGCATCTGTGCGGTATTTCACACCGCAGACCAGCCGCGTAACCTGGCAAAATCGGTTACGGTTGAGTAATAAATGGATGCCC |
| | TGCGTAAGCGGGTGTGGGCGGACAATAAAGTCTTAAACTGAACAAAATAGATCTAAACTATGACAATAAAGTCTTAAACTAGACAGAATAGTTGTAAA |
| | CTGAAATCAGTCCAGTTATGCTGTGAAAAAGCATACTGGACTTTTGTTATGGCTAAAGCAAACTCTTCATTTTCTGAAGTGCAAATTGCCCGTCGTAT |
| | TAAAGAGGGGCGTGGCCAAGGGCATGGTAAAGACTATATTCGCGGCGTTGTGACAATTTACCGAACAACTCCGCGGCCGGGAAGCCGATCTCGGCTTG |
| | AACGAATTGTTAGGTGGCGGTACTTGGGTCGATATCAAAGTGCATCACTTCTTCCCGTATGCCCAACTTTGTATAGAGAGCCACTGCGGGATCGTCAC |
| | CGTAATCTGCTTGCACGTAGATCACATAAGCACCAAGCGCGTTGGCCTCATGCTTGAGGAGATTGATGAGCGCGGTGGCAATGCCCTGCCTCCGGTGC |
| | TCGCCGGAGACTGCGAGATCATAGATATAGATCTCACTACGCGGCTGCTCAAACCTGGGCAGAACGTAAGCCGCGAGAGCGCCAACAACCGCTTCTTG |
| | GTCGAAGGCAGCAAGCGCGATGAATGTCTTACTACGGAGCAAGTTCCCGAGGTAATCGGAGTCCGGCTGATGTTGGGAGTAGGTGGCTACGTCTCCGA |
| | ACTCACGACCGAAAAGATCAAGAGCAGCCCGCATGGATTTGACTTGGTCAGGGCCGAGCCTACATGTGCGAATGATGCCCATACTTGAGCCACCTAAC |
| | TTTGTTTTAGGGCGACTGCCCTGCTGCGTAACATCGTTGCTGCTGCGTAACATCGTTGCTGCTCCATAACATCAAACATCGACCCACGGCGTAACGCG |
| | CTTGCTGCTTGGATGCCCGAGGCATAGACTGTACAAAAAAACAGTCATAACAAGCCATGAAAACCGCCACTGCGCCGTTACCACCGCTGCGTTCGGTC |
| | AAGGTTCTGGACCAGTTGCGTGAGCGCATACGCTACTTGCATTACAGTTTACGAACCGAACAGGCTTATGTCAACTGGGTTCGTGCCTTCATCCGTTT |
| | CCACGGTGTGCGTCACCCGGCAACCTTGGGCAGCAGCGAAGTCGAGGCATTTCTGTCCTGGCTGGCGAACGAGCGCAAGGTTTCGGTCTCCACGCATC |
| | GTCAGGCATTGGCGGCCTTGCTGTTCTTCTACGGCAAGGTGCTGTGCACGGATCTGCCCTGGCTTCAGGAGATCGGAAGACCTCGGCCGTCGCGGCGC |
| | TTGCCGGTGGTGCTGACCCCGGATGAAGTGGTTCGCATCCTCGGTTTTCTGGAAGGCGAGCATCGTTTGTTCGCCCAGGACTCTAGCTATAGTTCTAG |
| | TGGTTGGCTACGTATACTCCGGAATATTAATAGATCATGGAGATAATTAAAATGATAACCATCTCGCAAATAAATAAGTATTTTACTGTTTTCGTAAC |
| | AGTTTTGTAATAAAAAAACCTATAAATATTCCGGATTATTCATACCGTCCCACCATCGGGCGCGGATCTCGGTCCGAAACCATGTCGTACTACCATCA |
| | CCATCACCATCACGATTACGATATCCCAACGACCGAAAACCTGTATTTTCAGGGCGCCATGGGATCC |
| ceDNAFVIII- | GGCCGGCCCCTGCAGGCAGCTGCGCGCTCGCTCGCTCACTGAGGCCGCCCGGGCAAAGCCCGGGCGTCGGGCGACCTTTGGTCGCCCGGCCTCAGTGA |
| vector 15 | GCGAGCGAGCGCGCAGAGAGGGAGTGGCCAACTCCATCACTAGGGGTTCCTTGTAGTTAATGATTAACCCGCCATGCTACTTATCTACGTAGCCATGC |
| (SEQ ID NO: | TCTAGAAGGCTCAGAGGCACACAGGAGTTTCTGGGCTCACCCTGCCCCCTTCCAACCCCTCAGTTCCCATCCTCCAGCAGCTGTTTGTGTGCTGCCTC |
| 206) | TGAAGTCCACACTGAACAAACTTCAGCCTACTCATGTCCCTAAAATGGGCAAACATTGCAAGCAGCAAACAGCAAACACACAGCCCTCCCTGCCTGCT |
| | GACCTTGGAGCTGGGGCAGAGGTCAGAGACCTCTCTGGGCCCATGCCACCTCCAACATCCACTCGACCCCTTGGAATTTCGGTGGAGAGGAGCAGAGG |
| | TTGTCCTGGCGTGGTTTAGGTAGTGTGAGAGGGTCCGGGTTCAAAACCACTTGCTGGGTGGGGAGTCGTCAGTAAGTGGCTATGCCCCGACCCCGAAG |
| | CCTGTTTCCCCATCTGTACAATGGAAATGATAAAGACGCCCATCTGATAGGGTTTTTGTGGCAAATAAACATTTGGTTTTTTTGTTTTGTTTTGTTTT |
| | GTTTTTTGAGATGGAGGTTTGCTCTGTCGCCCAGGCTGGAGTGCAGTGACACAATCTCATCTCACCACAACCTTCCCCTGCCTCAGCCTCCCAAGTAG |
| | CTGGGATTACAAGCATGTGCCACCACACCTGGCTAATTTTCTATTTTTAGTAGAGACGGGTTTCTCCATGTTGGTCAGCCTCAGCCTCCCAAGTAACT |
| | GGGATTACAGGCCTGTGCCACCACACCCGGCTAATTTTTTCTATTTTTGACAGGGACGGGGTTTCACCATGTTGGTCAGGCTGGTCTAGAGGTACCGG |
| | ATCTTGCTACCAGTGGAACAGCCACTAAGGATTCTGCAGTGAGAGCAGAGGGCCAGCTAAGTGGTACTCTCCCAGAGACTGTCTGACTCACGCCACCC |
| | CCTCCACCTTGGACACAGGACGCTGTGGTTTCTGAGCCAGGTACAATGACTCCTTTCGGTAAGTGCAGTGGAAGCTGTACACTGCCCAGGCAAAGCGT |
| | CCGGGCAGCGTAGGCGGGCGACTCAGATCCCAGCCAGTGGACTTAGCCCCTGTTTGCTCCTCCGATAACTGGGGTGACCTTGGTTAATATTCACCAGC |
| | AGCCTCCCCCGTTGCCCCTCTGGATCCACTGCTTAAATACGGACGAGGACAGGGCCCTGTCTCCTCAGCTTCAGGCACCACCACTGACCTGGGACAGT |
| | GAATCCGGACTCTAAGGTAAATATAAAATTTTTAAGTGTATAATGTGTTAAACTACTGATTCTAATTGTTTCTCTCTTTTAGATTCCAACCTTTGGAA |
| | CTGAGTTTAAACGCCGCCACCATGCAGATCGAGCTGTCTACCTGCTTCTTCCTGTGCCTGCTGCGGTTCTGCTTCAGCGCCACCAGAAGATATTACCT |
| | GGGCGCCGTGGAACTGAGCTGGGACTACATGCAGTCTGACCTGGGAGAGCTGCCCGTGGACGCTAGATTTCCTCCAAGAGTGCCCAAGAGCTTCCCCT |
| | TCAACACCTCCGTGGTGTACAAGAAAACCCTGTTCGTGGAATTCACCGACCACCTGTTCAATATCGCCAAGCCTCGGCCTCCTTGGATGGGACTGCTG |
| | GGACCTACAATTCAGGCCGAGGTGTACGACACCGTGGTCATCACCCTGAAGAACATGGCCAGCCATCCTGTGTCTCTGCACGCCGTGGGAGTGTCTTA |
| | TTGGAAGGCTTCTGAGGGCGCCGAGTACGACGATCAGACAAGCCAGAGAGAGAAAGAGGACGACAAGGTTTTCCCTGGCGGCAGCCACACCTATGTCT |
| | GGCAGGTCCTGAAAGAAAACGGCCCTATGGCCTCCGATCCTCTGTGCCTGACATACAGCTACCTGAGCCACGTGGACCTGGTCAAGGACCTGAATTCT |
| | GGCCTGATCGGAGCCCTGCTCGTGTGTAGAGAAGGCAGCCTGGCCAAAGAGAAAACCCAGACACTGCACAAGTTCATCCTGCTGTTCGCCGTGTTCGA |
| | CGAGGGCAAGAGCTGGCACAGCGAGACAAAGAACAGCCTGATGCAGGACAGGGATGCCGCCTCTGCTAGAGCTTGGCCTAAGATGCACACCGTGAACG |
| | GCTACGTGAACAGAAGCCTGCCTGGACTGATCGGCTGCCACAGAAAGTCCGTGTACTGGCACGTGATCGGCATGGGCACAACACCTGAGGTGCACAGC |
| | ATCTTTCTGGAAGGCCACACCTTCCTCGTGCGGAACCACAGACAGGCCAGCCTGGAAATCAGCCCTATCACCTTCCTGACCGCTCAGACCCTGCTGAT |
| | GGATCTGGGCCAGTTTCTGCTGTTCTGCCACATCAGCTCCCACCAGCACGATGGCATGGAAGCCTACGTGAAGGTGGACAGCTGCCCCGAAGAACCCC |
| | AGCTGCGGATGAAGAACAACGAGGAAGCCGAGGACTACGACGACGACCTGACCGACTCTGAGATGGACGTCGTCAGATTCGACGACGATAACAGCCCC |
| | AGCTTCATCCAGATCAGAAGCGTGGCCAAGAAGCACCCCAAGACCTGGGTGCACTATATCGCCGCCGAGGAAGAGGACTGGGATTACGCTCCTCTGGT |
| | GCTGGCCCCTGACGACAGAAGCTACAAGAGCCAGTACCTGAACAACGGCCCTCAGCGGATCGGCCGGAAGTATAAGAAAGTGCGGTTCATGGCCTACA |
| | CCGACGAGACATTCAAGACCAGAGAGGCCATCCAGCACGAGAGCGGAATTCTGGGCCCTCTGCTGTATGGCGAAGTGGGCGATACACTGCTGATCATC |
| | TTCAAGAACCAGGCCAGCAGACCCTACAACATCTACCCTCACGGCATCACCGATGTGCGGCCCCTGTATTCTAGAAGGCTGCCCAAGGGCGTGAAGCA |
| | CCTGAAGGACTTCCCTATCCTGCCTGGCGAGATTTTCAAGTACAAGTGGACCGTGACCGTGGAAGATGGCCCCACCAAGAGCGACCCTAGATGTCTGA |
| | CACGGTACTACAGCAGCTTCGTGAACATGGAACGCGACCTGGCCAGCGGCCTGATTGGACCTCTGCTGATCTGCTACAAAGAAAGCGTGGACCAGCGG |
| | GGCAACCAGATCATGAGCGACAAGCGGAACGTGATCCTGTTTAGCGTGTTCGATGAGAACCGGTCCTGGTATCTGACCGAGAACATCCAGCGGTTTCT |
| | GCCCAATCCTGCCGGGGTGCAACTGGAAGATCCTGAGTTCCAGGCAAGCAACATCATGCACTCCATCAATGGCTATGTGTTCGACAGCCTGCAGCTGA |
| | GCGTGTGCCTGCACGAAGTGGCCTACTGGTACATCCTGAGCATTGGCGCCCAGACCGACTTCCTGTCCGTGTTCTTTAGCGGCTACACCTTCAAGCAC |
| | AAGATGGTGTACGAGGATACCCTGACACTGTTCCCATTCAGCGGCGAGACAGTGTTCATGAGCATGGAAAACCCCGGCCTGTGGATTCTGGGCTGTCA |
| | CAACAGCGACTTCCGGAACAGAGGCATGACAGCCCTGCTGAAGGTGTCCAGCTGCGACAAGAACACCGGCGACTACTACGAGGACAGCTATGAGGACA |
| | TCAGCGCCTACCTGCTGAGCAAGAACAATGCCATCGAGCCTCGGAGCTTCAGCCAGAATCCTCCTGTGCTGAAGCGGCACCAGCGCGAGATCACCAGA |
| | ACAACCCTGCAGAGCGACCAAGAGGAAATCGATTACGACGACACCATCAGCGTCGAGATGAAGAAAGAAGATTTCGACATCTACGACGAGGACGAGAA |
| | TCAGAGCCCCAGAAGCTTTCAGAAAAAGACCCGGCACTACTTCATTGCCGCCGTCGAGAGACTGTGGGACTACGGCATGTCTAGCAGCCCTCACGTGC |
| | TGAGAAATAGAGCCCAGAGCGGCAGCGTGCCCCAGTTCAAGAAAGTGGTGTTCCAAGAGTTCACCGACGGCAGCTTCACCCAGCCACTGTATAGAGGC |
| | GAGCTGAACGAGCATCTGGGCCTGCTGGGCCCTTATATCAGAGCCGAAGTGGAAGATAACATCATGGTCACCTTCCGGAATCAGGCTAGCCGGCCTTA |
| | CAGCTTCTACAGCTCCCTGATCAGCTACGAAGAGGACCAGAGACAGGGCGCTGAGCCCAGAAAGAACTTCGTGAAGCCCAACGAGACTAAGACCTACT |
| | TTTGGAAGGTGCAGCACCACATGGCCCCTACAAAGGACGAGTTCGACTGCAAAGCCTGGGCCTACTTCTCCGATGTGGATCTGGAAAAGGACGTGCAC |
| | AGCGGGCTCATCGGACCACTGCTTGTGTGCCACACCAACACACTGAACCCCGCTCACGGCAGACAAGTGACAGTGCAAGAGTTCGCCCTGTTCTTCAC |
| | CATCTTCGACGAAACAAAGAGCTGGTACTTCACCGAGAATATGGAACGGAACTGCAGAGCCCCTTGCAACATCCAGATGGAAGATCCCACCTTCAAAG |
| | AGAACTACCGGTTCCACGCCATCAACGGCTACATCATGGACACACTGCCCGGCCTGGTTATGGCCCAGGATCAGAGAATCCGGTGGTATCTGCTGTCC |
| | ATGGGCTCCAACGAGAATATCCACAGCATCCACTTCAGCGGCCACGTGTTCACCGTGCGGAAAAAAGAAGAGTACAAAATGGCCCTGTACAATCTGTA |
| | CCCTGGGGTGTTCGAAACCGTGGAAATGCTGCCTTCCAAGGCCGGCATTTGGAGAGTGGAATGTCTGATTGGAGAGCACCTCCACGCCGGAATGAGCA |
| | CCCTGTTTCTGGTGTACAGCAACAAGTGTCAGACCCCTCTCGGCATGGCCTCTGGACACATCAGAGACTTCCAGATCACCGCCTCTGGCCAGTACGGA |
| | CAGTGGGCTCCTAAACTGGCTCGGCTGCACTACAGCGGCAGCATCAATGCCTGGTCCACCAAAGAGCCCTTCAGCTGGATCAAGGTGGACCTGCTGGC |
| | TCCCATGATCATCCACGGAATCAAGACCCAGGGCGCCAGACAGAAGTTCAGCAGCCTGTACATCAGCCAGTTCATCATCATGTACAGCCTGGACGGCA |
| | AGAAGTGGCAGACCTACAGAGGCAACAGCACCGGCACACTCATGGTGTTCTTCGGCAACGTGGACTCCAGCGGCATTAAGCACAACATCTTCAACCCT |
| | CCAATCATTGCCCGGTACATCCGGCTGCACCCCACACACTACAGCATCCGGTCTACCCTGAGAATGGAACTGATGGGCTGCGACCTGAACAGCTGCTC |
| | TATGCCCCTCGGAATGGAAAGCAAGGCCATCAGCGACGCCCAGATCACAGCCAGCAGCTACTTCACCAACATGTTCGCCACTTGGAGCCCCTCCAAGG |
| | CTAGACTGCATCTGCAGGGCAGAAGCAACGCTTGGAGGCCCCAAGTGAACAACCCCAAAGAGTGGCTGCAGGTTGACTTTCAAAAGACCATGAAAGTG |
| | ACCGGCGTGACCACACAGGGCGTCAAGTCTCTGCTGACCTCTATGTACGTGAAAGAGTTCCTGATCTCCAGCAGCCAGGACGGCCATCAGTGGACCCT |
| | GTTTTTCCAGAACGGCAAAGTGAAAGTGTTCCAGGGCAATCAGGACAGCTTCACACCCGTGGTCAATTCTCTGGACCCTCCACTGCTGACCAGATACC |
| | TGCGGATTCACCCTCAGTCTTGGGTGCACCAGATCGCTCTGCGGATGGAAGTGCTGGGCTGTGAAGCTCAGGACCTCTACTAGTTAATTAAGAGCATC |
| | TTACCGCCATTTATTCCCATATTTGTTCTGTTTTTCTTGATTTGGGTATACATTTAAATGTTAATAAAACAAAATGGTGGGGCAATCATTTACATTTT |
| | TAGGGATATGTAATTACTAGTTCAGGTGTATTGCCACAAGACAAACATGTTAAGAAACTTTCCCGTTATTTACGCTCTGTTCCTGTTAATCAACCTCT |
| | GGATTACAAAATTTGTGAAAGATTGACTGATATTCTTAACTATGTTGCTCCTTTTACGCTGTGTGGATATGCTGCTTTATAGCCTCTGTATCTAGCTA |
| | TTGCTTCCCGTACGGCTTTCGTTTTCTCCTCCTTGTATAAATCCTGGTTGCTGTCTCTTTTAGAGGAGTTGTGGCCCGTTGTCCGTCAACGTGGCGTG |
| | GTGTGCTCTGTGTTTGCTGACGCAACCCCCACTGGCTGGGGCATTGCCACCACCTGTCAACTCCTTTCTGGGACTTTCGCTTTCCCCCTCCCGATCGC |
| | CACGGCAGAACTCATCGCCGCCTGCCTTGCCCGCTGCTGGACAGGGGCTAGGTTGCTGGGCACTGATAATTCCGTGGTGTTGTCTGTGCCTTCTAGTT |
| | GCCAGCCATCTGTTGTTTGCCCCTCCCCCGTGCCTTCCTTGACCCTGGAAGGTGCCACTCCCACTGTCCTTTCCTAATAAAATGAGGAAATTGCATCG |
| | CATTGTCTGAGTAGGTGTCATTCTATTCTGGGGGGTGGGGTGGGGCAGGACAGCAAGGGGGAGGATTGGGAAGACAATAGCAGGCATGCTGGGGATGC |
| | GGTGGGCTCTATGGCTCTAGAGCATGGCTACGTAGATAAGTAGCATGGCGGGTTAATCATTAACTACACCTGCAGGAGGAACCCCTAGTGATGGAGTT |
| | GGCCACTCCCTCTCTGCGCGCTCGCTCGCTCACTGAGGCCGGGCGACCAAAGGTCGCCCGACGCCCGGGCGGCCTCAGTGAGCGAGCGAGCGCGCAGC |
| | TGCCTGCAGGGGCGCGCCTCGAGGCATGCGGTACCAAGCTTGTCGAGAAGTACTAGAGGATCATAATCAGCCATACCACATTTGTAGAGGTTTTACTT |
| | GCTTTAAAAAACCTCCCACACCTCCCCCTGAACCTGAAACATAAAATGAATGCAATTGTTGTTGTTAACTTGTTTATTGCAGCTTATAATGGTTACAA |
| | ATAAAGCAATAGCATCACAAATTTCACAAATAAAGCATTTTTTTCACTGCATTCTAGTTGTGGTTTGTCCAAACTCATCAATGTATCTTATCATGTCT |
| | GGATCTGATCACTGATATCGCCTAGGAGATCCGAACCAGATAAGTGAAATCTAGTTCCAAACTATTTTGTCATTTTTAATTTTCGTATTAGCTTACGA |
| | CGCTACACCCAGTTCCCATCTATTTTGTCACTCTTCCCTAAATAATCCTTAAAAACTCCATTTCCACCCCTCCCAGTTCCCAACTATTTTGTCCGCCC |
| | ACAGCGGGGCATTTTTCTTCCTGTTATGTTTTTAATCAAACATCCTGCCAACTCCATGTGACAAACCGTCATCTTCGGCTACTTTTTCTCTGTCACAG |
| | AATGAAAATTTTTCTGTCATCTCTTCGTTATTAATGTTTGTAATTGACTGAATATCAACGCTTATTTGCAGCCTGAATGGCGAATGGGACGCGCCCTG |
| | TAGCGGCGCATTAAGCGCGGCGGGTGTGGTGGTTACGCGCAGCGTGACCGCTACACTTGCCAGCGCCCTAGCGCCCGCTCCTTTCGCTTTCTTCCCTT |
| | CCTTTCTCGCCACGTTCGCCGGCTTTCCCCGTCAAGCTCTAAATCGGGGGCTCCCTTTAGGGTTCCGATTTAGTGCTTTACGGCACCTCGACCCCAAA |
| | AAACTTGATTAGGGTGATGGTTCACGTAGTGGGCCATCGCCCTGATAGACGGTTTTTCGCCCTTTGACGTTGGAGTCCACGTTCTTTAATAGTGGACT |
| | CTTGTTCCAAACTGGAACAACACTCAACCCTATCTCGGTCTATTCTTTTGATTTATAAGGGATTTTGCCGATTTCGGCCTATTGGTTAAAAAATGAGC |
| | TGATTTAACAAAAATTTAACGCGAATTTTAACAAAATATTAACGTTTACAATTTCAGGTGGCACTTTTCGGGGAAATGTGCGCGGAACCCCTATTTGT |
| | TTATTTTTCTAAATACATTCAAATATGTATCCGCTCATGAGACAATAACCCTGATAAATGCTTCAATAATATTGAAAAAGGAAGAGTATGAGTATTCA |
| | ACATTTCCGTGTCGCCCTTATTCCCTTTTTTGCGGCATTTTGCCTTCCTGTTTTTGCTCACCCAGAAACGCTGGTGAAAGTAAAAGATGCTGAAGATC |
| | AGTTGGGTGCACGAGTGGGTTACATCGAACTGGATCTCAACAGCGGTAAGATCCTTGAGAGTTTTCGCCCCGAAGAACGTTTTCCAATGATGAGCACT |
| | TTTAAAGTTCTGCTATGTGGCGCGGTATTATCCCGTATTGACGCCGGGCAAGAGCAACTCGGTCGCCGCATACACTATTCTCAGAATGACTTGGTTGA |
| | GTACTCACCAGTCACAGAAAAGCATCTTACGGATGGCATGACAGTAAGAGAATTATGCAGTGCTGCCATAACCATGAGTGATAACACTGCGGCCAACT |
| | TACTTCTGACAACGATCGGAGGACCGAAGGAGCTAACCGCTTTTTTGCACAACATGGGGGATCATGTAACTCGCCTTGATCGTTGGGAACCGGAGCTG |
| | AATGAAGCCATACCAAACGACGAGCGTGACACCACGATGCCTGTAGCAATGGCAACAACGTTGCGCAAACTATTAACTGGCGAACTACTTACTCTAGC |
| | TTCCCGGCAACAATTAATAGACTGGATGGAGGCGGATAAAGTTGCAGGACCACTTCTGCGCTCGGCCCTTCCGGCTGGCTGGTTTATTGCTGATAAAT |
| | CTGGAGCCGGTGAGCGTGGGTCTCGCGGTATCATTGCAGCACTGGGGCCAGATGGTAAGCCCTCCCGTATCGTAGTTATCTACACGACGGGGAGTCAG |
| | GCAACTATGGATGAACGAAATAGACAGATCGCTGAGATAGGTGCCTCACTGATTAAGCATTGGTAACTGTCAGACCAAGTTTACTCATATATACTTTA |
| | GATTGATTTAAAACTTCATTTTTAATTTAAAAGGATCTAGGTGAAGATCCTTTTTGATAATCTCATGACCAAAATCCCTTAACGTGAGTTTTCGTTCC |
| | ACTGAGCGTCAGACCCCGTAGAAAAGATCAAAGGATCTTCTTGAGATCCTTTTTTTCTGCGCGTAATCTGCTGCTTGCAAACAAAAAAACCACCGCTA |
| | CCAGCGGTGGTTTGTTTGCCGGATCAAGAGCTACCAACTCTTTTTCCGAAGGTAACTGGCTTCAGCAGAGCGCAGATACCAAATACTGTCCTTCTAGT |
| | GTAGCCGTAGTTAGGCCACCACTTCAAGAACTCTGTAGCACCGCCTACATACCTCGCTCTGCTAATCCTGTTACCAGTGGCTGCTGCCAGTGGCGATA |
| | AGTCGTGTCTTACCGGGTTGGACTCAAGACGATAGTTACCGGATAAGGCGCAGCGGTCGGGCTGAACGGGGGGTTCGTGCACACAGCCCAGCTTGGAG |
| | CGAACGACCTACACCGAACTGAGATACCTACAGCGTGAGCATTGAGAAAGCGCCACGCTTCCCGAAGGGAGAAAGGCGGACAGGTATCCGGTAAGCGG |
| | CAGGGTCGGAACAGGAGAGCGCACGAGGGAGCTTCCAGGGGGAAACGCCTGGTATCTTTATAGTCCTGTCGGGTTTCGCCACCTCTGACTTGAGCGTC |
| | GATTTTTGTGATGCTCGTCAGGGGGGCGGAGCCTATGGAAAAACGCCAGCAACGCGGCCTTTTTACGGTTCCTGGCCTTTTGCTGGCCTTTTGCTCAC |
| | ATGTTCTTTCCTGCGTTATCCCCTGATTCTGTGGATAACCGTATTACCGCCTTTGAGTGAGCTGATACCGCTCGCCGCAGCCGAACGACCGAGCGCAG |
| | CGAGTCAGTGAGCGAGGAAGCGGAAGAGCGCCTGATGCGGTATTTTCTCCTTACGCATCTGTGCGGTATTTCACACCGCAGACCAGCCGCGTAACCTG |
| | GCAAAATCGGTTACGGTTGAGTAATAAATGGATGCCCTGCGTAAGCGGGTGTGGGCGGACAATAAAGTCTTAAACTGAACAAAATAGATCTAAACTAT |
| | GACAATAAAGTCTTAAACTAGACAGAATAGTTGTAAACTGAAATCAGTCCAGTTATGCTGTGAAAAAGCATACTGGACTTTTGTTATGGCTAAAGCAA |
| | ACTCTTCATTTTCTGAAGTGCAAATTGCCCGTCGTATTAAAGAGGGGCGTGGCCAAGGGCATGGTAAAGACTATATTCGCGGCGTTGTGACAATTTAC |
| | CGAACAACTCCGCGGCCGGGAAGCCGATCTCGGCTTGAACGAATTGTTAGGTGGCGGTACTTGGGTCGATATCAAAGTGCATCACTTCTTCCCGTATG |
| | CCCAACTTTGTATAGAGAGCCACTGCGGGATCGTCACCGTAATCTGCTTGCACGTAGATCACATAAGCACCAAGCGCGTTGGCCTCATGCTTGAGGAG |
| | ATTGATGAGCGCGGTGGCAATGCCCTGCCTCCGGTGCTCGCCGGAGACTGCGAGATCATAGATATAGATCTCACTACGCGGCTGCTCAAACCTGGGCA |
| | GAACGTAAGCCGCGAGAGCGCCAACAACCGCTTCTTGGTCGAAGGCAGCAAGCGCGATGAATGTCTTACTACGGAGCAAGTTCCCGAGGTAATCGGAG |
| | TCCGGCTGATGTTGGGAGTAGGTGGCTACGTCTCCGAACTCACGACCGAAAAGATCAAGAGCAGCCCGCATGGATTTGACTTGGTCAGGGCCGAGCCT |
| | ACATGTGCGAATGATGCCCATACTTGAGCCACCTAACTTTGTTTTAGGGCGACTGCCCTGCTGCGTAACATCGTTGCTGCTGCGTAACATCGTTGCTG |
| | CTCCATAACATCAAACATCGACCCACGGCGTAACGCGCTTGCTGCTTGGATGCCCGAGGCATAGACTGTACAAAAAAACAGTCATAACAAGCCATGAA |
| | AACCGCCACTGCGCCGTTACCACCGCTGCGTTCGGTCAAGGTTCTGGACCAGTTGCGTGAGCGCATACGCTACTTGCATTACAGTTTACGAACCGAAC |
| | AGGCTTATGTCAACTGGGTTCGTGCCTTCATCCGTTTCCACGGTGTGCGTCACCCGGCAACCTTGGGCAGCAGCGAAGTCGAGGCATTTCTGTCCTGG |
| | CTGGCGAACGAGCGCAAGGTTTCGGTCTCCACGCATCGTCAGGCATTGGCGGCCTTGCTGTTCTTCTACGGCAAGGTGCTGTGCACGGATCTGCCCTG |
| | GCTTCAGGAGATCGGAAGACCTCGGCCGTCGCGGCGCTTGCCGGTGGTGCTGACCCCGGATGAAGTGGTTCGCATCCTCGGTTTTCTGGAAGGCGAGC |
| | ATCGTTTGTTCGCCCAGGACTCTAGCTATAGTTCTAGTGGTTGGCTACGTATACTCCGGAATATTAATAGATCATGGAGATAATTAAAATGATAACCA |
| | TCTCGCAAATAAATAAGTATTTTACTGTTTTCGTAACAGTTTTGTAATAAAAAAACCTATAAATATTCCGGATTATTCATACCGTCCCACCATCGGGC |
| | GCGGATCTCGGTCCGAAACCATGTCGTACTACCATCACCATCACCATCACGATTACGATATCCCAACGACCGAAAACCTGTATTTTCAGGGCGCCATG |
| | GGATCC |
| ceDNAFVIII- | GGCCGGCCCCTGCAGGCAGCTGCGCGCTCGCTCGCTCACTGAGGCCGCCCGGGCAAAGCCCGGGCGTCGGGCGACCTTTGGTCGCCCGGCCTCAGTGA |
| vector 16 | GCGAGCGAGCGCGCAGAGAGGGAGTGGCCAACTCCATCACTAGGGGTTCCTTGTAGTTAATGATTAACCCGCCATGCTACTTATCTACGTAGCCATGC |
| (SEQ ID NO: | TCTAGAAGGCTCAGAGGCACACAGGAGTTTCTGGGCTCACCCTGCCCCCTTCCAACCCCTCAGTTCCCATCCTCCAGCAGCTGTTTGTGTGCTGCCTC |
| 207) | TGAAGTCCACACTGAACAAACTTCAGCCTACTCATGTCCCTAAAATGGGCAAACATTGCAAGCAGCAAACAGCAAACACACAGCCCTCCCTGCCTGCT |
| | GACCTTGGAGCTGGGGCAGAGGTCAGAGACCTCTCTGGGCCCATGCCACCTCCAACATCCACTCGACCCCTTGGAATTTCGGTGGAGAGGAGCAGAGG |
| | TTGTCCTGGCGTGGTTTAGGTAGTGTGAGAGGGTCCGGGTTCAAAACCACTTGCTGGGTGGGGAGTCGTCAGTAAGTGGCTATGCCCCGACCCCGAAG |
| | CCTGTTTCCCCATCTGTACAATGGAAATGATAAAGACGCCCATCTGATAGGGTTTTTGTGGCAAATAAACATTTGGTTTTTTTGTTTTGTTTTGTTTT |
| | GTTTTTTGAGATGGAGGTTTGCTCTGTCGCCCAGGCTGGAGTGCAGTGACACAATCTCATCTCACCACAACCTTCCCCTGCCTCAGCCTCCCAAGTAG |
| | CTGGGATTACAAGCATGTGCCACCACACCTGGCTAATTTTCTATTTTTAGTAGAGACGGGTTTCTCCATGTTGGTCAGCCTCAGCCTCCCAAGTAACT |
| | GGGATTACAGGCCTGTGCCACCACACCCGGCTAATTTTTTCTATTTTTGACAGGGACGGGGTTTCACCATGTTGGTCAGGCTGGTCTAGAGGTACCGG |
| | ATCTTGCTACCAGTGGAACAGCCACTAAGGATTCTGCAGTGAGAGCAGAGGGCCAGCTAAGTGGTACTCTCCCAGAGACTGTCTGACTCACGCCACCC |
| | CCTCCACCTTGGACACAGGACGCTGTGGTTTCTGAGCCAGGTACAATGACTCCTTTCGGTAAGTGCAGTGGAAGCTGTACACTGCCCAGGCAAAGCGT |
| | CCGGGCAGCGTAGGCGGGCGACTCAGATCCCAGCCAGTGGACTTAGCCCCTGTTTGCTCCTCCGATAACTGGGGTGACCTTGGTTAATATTCACCAGC |
| | AGCCTCCCCCGTTGCCCCTCTGGATCCACTGCTTAAATACGGACGAGGACAGGGCCCTGTCTCCTCAGCTTCAGGCACCACCACTGACCTGGGACAGT |
| | GAATCCGGACTCTAAGGTAAATATAAAATTTTTAAGTGTATAATGTGTTAAACTACTGATTCTAATTGTTTCTCTCTTTTAGATTCCAACCTTTGGAA |
| | CTGAGTTTAAACGCCGCCACCATGCAGATTGAGCTGAGCACCTGCTTCTTCCTGTGCCTGCTGAGGTTCTGCTTCTCTGCCACCAGGAGATACTACCT |
| | GGGGGCTGTGGAGCTGAGCTGGGACTACATGCAGTCTGACCTGGGGGAGCTGCCTGTGGATGCCAGGTTCCCCCCCAGAGTGCCCAAGAGCTTCCCCT |
| | TCAACACCTCTGTGGTGTACAAGAAGACCCTGTTTGTGGAGTTCACTGACCACCTGTTCAACATTGCCAAGCCCAGGCCCCCCTGGATGGGCCTGCTG |
| | GGCCCCACCATCCAGGCTGAGGTGTATGACACTGTGGTGATCACCCTGAAGAACATGGCCAGCCACCCTGTGAGCCTGCATGCTGTGGGGGTGAGCTA |
| | CTGGAAGGCCTCTGAGGGGGCTGAGTATGATGACCAGACCAGCCAGAGGGAGAAGGAGGATGACAAGGTGTTCCCTGGGGGCAGCCACACCTATGTGT |
| | GGCAGGTGCTGAAGGAGAATGGCCCCATGGCCTCTGACCCCCTGTGCCTGACCTACAGCTACCTGAGCCATGTGGACCTGGTGAAGGACCTGAACTCT |
| | GGCCTGATTGGGGCCCTGCTGGTGTGCAGGGAGGGCAGCCTGGCCAAGGAGAAGACCCAGACCCTGCACAAGTTCATCCTGCTGTTTGCTGTGTTTGA |
| | TGAGGGCAAGAGCTGGCACTCTGAAACCAAGAACAGCCTGATGCAGGACAGGGATGCTGCCTCTGCCAGGGCCTGGCCCAAGATGCACACTGTGAATG |
| | GCTATGTGAACAGGAGCCTGCCTGGCCTGATTGGCTGCCACAGGAAGTCTGTGTACTGGCATGTGATTGGCATGGGCACCACCCCTGAGGTGCACAGC |
| | ATCTTCCTGGAGGGCCACACCTTCCTGGTCAGGAACCACAGGCAGGCCAGCCTGGAGATCAGCCCCATCACCTTCCTGACTGCCCAGACCCTGCTGAT |
| | GGACCTGGGCCAGTTCCTGCTGTTCTGCCACATCAGCAGCCACCAGCATGATGGCATGGAGGCCTATGTGAAGGTGGACAGCTGCCCTGAGGAGCCCC |
| | AGCTGAGGATGAAGAACAATGAGGAGGCTGAGGACTATGATGATGACCTGACTGACTCTGAGATGGATGTGGTGAGGTTTGATGATGACAACAGCCCC |
| | AGCTTCATCCAGATCAGGTCTGTGGCCAAGAAGCACCCCAAGACCTGGGTGCACTACATTGCTGCTGAGGAGGAGGACTGGGACTATGCCCCCCTGGT |
| | GCTGGCCCCTGATGACAGGAGCTACAAGAGCCAGTACCTGAACAATGGCCCCCAGAGGATTGGCAGGAAGTACAAGAAGGTCAGGTTCATGGCCTACA |
| | CTGATGAAACCTTCAAGACCAGGGAGGCCATCCAGCATGAGTCTGGCATCCTGGGCCCCCTGCTGTATGGGGAGGTGGGGGACACCCTGCTGATCATC |
| | TTCAAGAACCAGGCCAGCAGGCCCTACAACATCTACCCCCATGGCATCACTGATGTGAGGCCCCTGTACAGCAGGAGGCTGCCCAAGGGGGTGAAGCA |
| | CCTGAAGGACTTCCCCATCCTGCCTGGGGAGATCTTCAAGTACAAGTGGACTGTGACTGTGGAGGATGGCCCCACCAAGTCTGACCCCAGGTGCCTGA |
| | CCAGATACTACAGCAGCTTTGTGAACATGGAGAGGGACCTGGCCTCTGGCCTGATTGGCCCCCTGCTGATCTGCTACAAGGAGTCTGTGGACCAGAGG |
| | GGCAACCAGATCATGTCTGACAAGAGGAATGTGATCCTGTTCTCTGTGTTTGATGAGAACAGGAGCTGGTACCTGACTGAGAACATCCAGAGGTTCCT |
| | GCCCAACCCTGCTGGGGTGCAGCTGGAGGACCCTGAGTTCCAGGCCAGCAACATCATGCACAGCATCAATGGCTATGTGTTTGACAGCCTGCAGCTGT |
| | CTGTGTGCCTGCATGAGGTGGCCTACTGGTACATCCTGAGCATTGGGGCCCAGACTGACTTCCTGTCTGTGTTCTTCTCTGGCTACACCTTCAAGCAC |
| | AAGATGGTGTATGAGGACACCCTGACCCTGTTCCCCTTCTCTGGGGAGACTGTGTTCATGAGCATGGAGAACCCTGGCCTGTGGATTCTGGGCTGCCA |
| | CAACTCTGACTTCAGGAACAGGGGCATGACTGCCCTGCTGAAAGTCTCCAGCTGTGACAAGAACACTGGGGACTACTATGAGGACAGCTATGAGGACA |
| | TCTCTGCCTACCTGCTGAGCAAGAACAATGCCATTGAGCCCAGGAGCTTCAGCCAGAATGCCACTAATGTGTCTAACAACAGCAACACCAGCAATGAC |
| | AGCAATGTGTCTCCCCCAGTGCTGAAGAGGCACCAGAGGGAGATCACCAGGACCACCCTGCAGTCTGACCAGGAGGAGATTGACTATGATGACACCAT |
| | CTCTGTGGAGATGAAGAAGGAGGACTTTGACATCTACGACGAGGACGAGAACCAGAGCCCCAGGAGCTTCCAGAAGAAGACCAGGCACTACTTCATTG |
| | CTGCTGTGGAGAGGCTGTGGGACTATGGCATGAGCAGCAGCCCCCATGTGCTGAGGAACAGGGCCCAGTCTGGCTCTGTGCCCCAGTTCAAGAAGGTG |
| | GTGTTCCAGGAGTTCACTGATGGCAGCTTCACCCAGCCCCTGTACAGAGGGGAGCTGAATGAGCACCTGGGCCTGCTGGGCCCCTACATCAGGGCTGA |
| | GGTGGAGGACAACATCATGGTGACCTTCAGGAACCAGGCCAGCAGGCCCTACAGCTTCTACAGCAGCCTGATCAGCTATGAGGAGGACCAGAGGCAGG |
| | GGGCTGAGCCCAGGAAGAACTTTGTGAAGCCCAATGAAACCAAGACCTACTTCTGGAAGGTGCAGCACCACATGGCCCCCACCAAGGATGAGTTTGAC |
| | TGCAAGGCCTGGGCCTACTTCTCTGATGTGGACCTGGAGAAGGATGTGCACTCTGGCCTGATTGGCCCCCTGCTGGTGTGCCACACCAACACCCTGAA |
| | CCCTGCCCATGGCAGGCAGGTGACTGTGCAGGAGTTTGCCCTGTTCTTCACCATCTTTGATGAAACCAAGAGCTGGTACTTCACTGAGAACATGGAGA |
| | GGAACTGCAGGGCCCCCTGCAACATCCAGATGGAGGACCCCACCTTCAAGGAGAACTACAGGTTCCATGCCATCAATGGCTACATCATGGACACCCTG |
| | CCTGGCCTGGTGATGGCCCAGGACCAGAGGATCAGGTGGTACCTGCTGAGCATGGGCAGCAATGAGAACATCCACAGCATCCACTTCTCTGGCCATGT |
| | GTTCACTGTGAGGAAGAAGGAGGAGTACAAGATGGCCCTGTACAACCTGTACCCTGGGGTGTTTGAGACTGTGGAGATGCTGCCCAGCAAGGCTGGCA |
| | TCTGGAGGGTGGAGTGCCTGATTGGGGAGCACCTGCATGCTGGCATGAGCACCCTGTTCCTGGTGTACAGCAACAAGTGCCAGACCCCCCTGGGCATG |
| | GCCTCTGGCCACATCAGGGACTTCCAGATCACTGCCTCTGGCCAGTATGGCCAGTGGGCCCCCAAGCTGGCCAGGCTGCACTACTCTGGCAGCATCAA |
| | TGCCTGGAGCACCAAGGAGCCCTTCAGCTGGATCAAGGTGGACCTGCTGGCCCCCATGATCATCCATGGCATCAAGACCCAGGGGGCCAGGCAGAAGT |
| | TCAGCAGCCTGTACATCAGCCAGTTCATCATCATGTACAGCCTGGATGGCAAGAAGTGGCAGACCTACAGGGGCAACAGCACTGGCACCCTGATGGTG |
| | TTCTTTGGCAATGTGGACAGCTCTGGCATCAAGCACAACATCTTCAACCCCCCCATCATTGCCAGATACATCAGGCTGCACCCCACCCACTACAGCAT |
| | CAGGAGCACCCTGAGGATGGAGCTGATGGGCTGTGACCTGAACAGCTGCAGCATGCCCCTGGGCATGGAGAGCAAGGCCATCTCTGATGCCCAGATCA |
| | CTGCCAGCAGCTACTTCACCAACATGTTTGCCACCTGGAGCCCCAGCAAGGCCAGGCTGCACCTGCAGGGCAGGAGCAATGCCTGGAGGCCCCAGGTC |
| | AACAACCCCAAGGAGTGGCTGCAGGTGGACTTCCAGAAGACCATGAAGGTGACTGGGGTGACCACCCAGGGGGTGAAGAGCCTGCTGACCAGCATGTA |
| | TGTGAAGGAGTTCCTGATCAGCAGCAGCCAGGATGGCCACCAGTGGACCCTGTTCTTCCAGAATGGCAAGGTGAAGGTGTTCCAGGGCAACCAGGACA |
| | GCTTCACCCCTGTGGTGAACAGCCTGGACCCCCCCCTGCTGACCAGATACCTGAGGATTCACCCCCAGAGCTGGGTGCACCAGATTGCCCTGAGGATG |
| | GAGGTGCTGGGCTGTGAGGCCCAGGACCTGTACTGATTAATTAAGAGCATCTTACCGCCATTTATTCCCATATTTGTTCTGTTTTTCTTGATTTGGGT |
| | ATACATTTAAATGTTAATAAAACAAAATGGTGGGGCAATCATTTACATTTTTAGGGATATGTAATTACTAGTTCAGGTGTATTGCCACAAGACAAACA |
| | TGTTAAGAAACTTTCCCGTTATTTACGCTCTGTTCCTGTTAATCAACCTCTGGATTACAAAATTTGTGAAAGATTGACTGATATTCTTAACTATGTTG |
| | CTCCTTTTACGCTGTGTGGATATGCTGCTTTATAGCCTCTGTATCTAGCTATTGCTTCCCGTACGGCTTTCGTTTTCTCCTCCTTGTATAAATCCTGG |
| | TTGCTGTCTCTTTTAGAGGAGTTGTGGCCCGTTGTCCGTCAACGTGGCGTGGTGTGCTCTGTGTTTGCTGACGCAACCCCCACTGGCTGGGGCATTGC |
| | CACCACCTGTCAACTCCTTTCTGGGACTTTCGCTTTCCCCCTCCCGATCGCCACGGCAGAACTCATCGCCGCCTGCCTTGCCCGCTGCTGGACAGGGG |
| | CTAGGTTGCTGGGCACTGATAATTCCGTGGTGTTGTCTGTGCCTTCTAGTTGCCAGCCATCTGTTGTTTGCCCCTCCCCCGTGCCTTCCTTGACCCTG |
| | GAAGGTGCCACTCCCACTGTCCTTTCCTAATAAAATGAGGAAATTGCATCGCATTGTCTGAGTAGGTGTCATTCTATTCTGGGGGGTGGGGTGGGGCA |
| | GGACAGCAAGGGGGAGGATTGGGAAGACAATAGCAGGCATGCTGGGGATGCGGTGGGCTCTATGGCTCTAGAGCATGGCTACGTAGATAAGTAGCATG |
| | GCGGGTTAATCATTAACTACACCTGCAGGAGGAACCCCTAGTGATGGAGTTGGCCACTCCCTCTCTGCGCGCTCGCTCGCTCACTGAGGCCGGGCGAC |
| | CAAAGGTCGCCCGACGCCCGGGCGGCCTCAGTGAGCGAGCGAGCGCGCAGCTGCCTGCAGGGGCGCGCCTCGAGGCATGCGGTACCAAGCTTGTCGAG |
| | AAGTACTAGAGGATCATAATCAGCCATACCACATTTGTAGAGGTTTTACTTGCTTTAAAAAACCTCCCACACCTCCCCCTGAACCTGAAACATAAAAT |
| | GAATGCAATTGTTGTTGTTAACTTGTTTATTGCAGCTTATAATGGTTACAAATAAAGCAATAGCATCACAAATTTCACAAATAAAGCATTTTTTTCAC |
| | TGCATTCTAGTTGTGGTTTGTCCAAACTCATCAATGTATCTTATCATGTCTGGATCTGATCACTGATATCGCCTAGGAGATCCGAACCAGATAAGTGA |
| | AATCTAGTTCCAAACTATTTTGTCATTTTTAATTTTCGTATTAGCTTACGACGCTACACCCAGTTCCCATCTATTTTGTCACTCTTCCCTAAATAATC |
| | CTTAAAAACTCCATTTCCACCCCTCCCAGTTCCCAACTATTTTGTCCGCCCACAGCGGGGCATTTTTCTTCCTGTTATGTTTTTAATCAAACATCCTG |
| | CCAACTCCATGTGACAAACCGTCATCTTCGGCTACTTTTTCTCTGTCACAGAATGAAAATTTTTCTGTCATCTCTTCGTTATTAATGTTTGTAATTGA |
| | CTGAATATCAACGCTTATTTGCAGCCTGAATGGCGAATGGGACGCGCCCTGTAGCGGCGCATTAAGCGCGGCGGGTGTGGTGGTTACGCGCAGCGTGA |
| | CCGCTACACTTGCCAGCGCCCTAGCGCCCGCTCCTTTCGCTTTCTTCCCTTCCTTTCTCGCCACGTTCGCCGGCTTTCCCCGTCAAGCTCTAAATCGG |
| | GGGCTCCCTTTAGGGTTCCGATTTAGTGCTTTACGGCACCTCGACCCCAAAAAACTTGATTAGGGTGATGGTTCACGTAGTGGGCCATCGCCCTGATA |
| | GACGGTTTTTCGCCCTTTGACGTTGGAGTCCACGTTCTTTAATAGTGGACTCTTGTTCCAAACTGGAACAACACTCAACCCTATCTCGGTCTATTCTT |
| | TTGATTTATAAGGGATTTTGCCGATTTCGGCCTATTGGTTAAAAAATGAGCTGATTTAACAAAAATTTAACGCGAATTTTAACAAAATATTAACGTTT |
| | ACAATTTCAGGTGGCACTTTTCGGGGAAATGTGCGCGGAACCCCTATTTGTTTATTTTTCTAAATACATTCAAATATGTATCCGCTCATGAGACAATA |
| | ACCCTGATAAATGCTTCAATAATATTGAAAAAGGAAGAGTATGAGTATTCAACATTTCCGTGTCGCCCTTATTCCCTTTTTTGCGGCATTTTGCCTTC |
| | CTGTTTTTGCTCACCCAGAAACGCTGGTGAAAGTAAAAGATGCTGAAGATCAGTTGGGTGCACGAGTGGGTTACATCGAACTGGATCTCAACAGCGGT |
| | AAGATCCTTGAGAGTTTTCGCCCCGAAGAACGTTTTCCAATGATGAGCACTTTTAAAGTTCTGCTATGTGGCGCGGTATTATCCCGTATTGACGCCGG |
| | GCAAGAGCAACTCGGTCGCCGCATACACTATTCTCAGAATGACTTGGTTGAGTACTCACCAGTCACAGAAAAGCATCTTACGGATGGCATGACAGTAA |
| | GAGAATTATGCAGTGCTGCCATAACCATGAGTGATAACACTGCGGCCAACTTACTTCTGACAACGATCGGAGGACCGAAGGAGCTAACCGCTTTTTTG |
| | CACAACATGGGGGATCATGTAACTCGCCTTGATCGTTGGGAACCGGAGCTGAATGAAGCCATACCAAACGACGAGCGTGACACCACGATGCCTGTAGC |
| | AATGGCAACAACGTTGCGCAAACTATTAACTGGCGAACTACTTACTCTAGCTTCCCGGCAACAATTAATAGACTGGATGGAGGCGGATAAAGTTGCAG |
| | GACCACTTCTGCGCTCGGCCCTTCCGGCTGGCTGGTTTATTGCTGATAAATCTGGAGCCGGTGAGCGTGGGTCTCGCGGTATCATTGCAGCACTGGGG |
| | CCAGATGGTAAGCCCTCCCGTATCGTAGTTATCTACACGACGGGGAGTCAGGCAACTATGGATGAACGAAATAGACAGATCGCTGAGATAGGTGCCTC |
| | ACTGATTAAGCATTGGTAACTGTCAGACCAAGTTTACTCATATATACTTTAGATTGATTTAAAACTTCATTTTTAATTTAAAAGGATCTAGGTGAAGA |
| | TCCTTTTTGATAATCTCATGACCAAAATCCCTTAACGTGAGTTTTCGTTCCACTGAGCGTCAGACCCCGTAGAAAAGATCAAAGGATCTTCTTGAGAT |
| | CCTTTTTTTCTGCGCGTAATCTGCTGCTTGCAAACAAAAAAACCACCGCTACCAGCGGTGGTTTGTTTGCCGGATCAAGAGCTACCAACTCTTTTTCC |
| | GAAGGTAACTGGCTTCAGCAGAGCGCAGATACCAAATACTGTCCTTCTAGTGTAGCCGTAGTTAGGCCACCACTTCAAGAACTCTGTAGCACCGCCTA |
| | CATACCTCGCTCTGCTAATCCTGTTACCAGTGGCTGCTGCCAGTGGCGATAAGTCGTGTCTTACCGGGTTGGACTCAAGACGATAGTTACCGGATAAG |
| | GCGCAGCGGTCGGGCTGAACGGGGGGTTCGTGCACACAGCCCAGCTTGGAGCGAACGACCTACACCGAACTGAGATACCTACAGCGTGAGCATTGAGA |
| | AAGCGCCACGCTTCCCGAAGGGAGAAAGGCGGACAGGTATCCGGTAAGCGGCAGGGTCGGAACAGGAGAGCGCACGAGGGAGCTTCCAGGGGGAAACG |
| | CCTGGTATCTTTATAGTCCTGTCGGGTTTCGCCACCTCTGACTTGAGCGTCGATTTTTGTGATGCTCGTCAGGGGGGCGGAGCCTATGGAAAAACGCC |
| | AGCAACGCGGCCTTTTTACGGTTCCTGGCCTTTTGCTGGCCTTTTGCTCACATGTTCTTTCCTGCGTTATCCCCTGATTCTGTGGATAACCGTATTAC |
| | CGCCTTTGAGTGAGCTGATACCGCTCGCCGCAGCCGAACGACCGAGCGCAGCGAGTCAGTGAGCGAGGAAGCGGAAGAGCGCCTGATGCGGTATTTTC |
| | TCCTTACGCATCTGTGCGGTATTTCACACCGCAGACCAGCCGCGTAACCTGGCAAAATCGGTTACGGTTGAGTAATAAATGGATGCCCTGCGTAAGCG |
| | GGTGTGGGCGGACAATAAAGTCTTAAACTGAACAAAATAGATCTAAACTATGACAATAAAGTCTTAAACTAGACAGAATAGTTGTAAACTGAAATCAG |
| | TCCAGTTATGCTGTGAAAAAGCATACTGGACTTTTGTTATGGCTAAAGCAAACTCTTCATTTTCTGAAGTGCAAATTGCCCGTCGTATTAAAGAGGGG |
| | CGTGGCCAAGGGCATGGTAAAGACTATATTCGCGGCGTTGTGACAATTTACCGAACAACTCCGCGGCCGGGAAGCCGATCTCGGCTTGAACGAATTGT |
| | TAGGTGGCGGTACTTGGGTCGATATCAAAGTGCATCACTTCTTCCCGTATGCCCAACTTTGTATAGAGAGCCACTGCGGGATCGTCACCGTAATCTGC |
| | TTGCACGTAGATCACATAAGCACCAAGCGCGTTGGCCTCATGCTTGAGGAGATTGATGAGCGCGGTGGCAATGCCCTGCCTCCGGTGCTCGCCGGAGA |
| | CTGCGAGATCATAGATATAGATCTCACTACGCGGCTGCTCAAACCTGGGCAGAACGTAAGCCGCGAGAGCGCCAACAACCGCTTCTTGGTCGAAGGCA |
| | GCAAGCGCGATGAATGTCTTACTACGGAGCAAGTTCCCGAGGTAATCGGAGTCCGGCTGATGTTGGGAGTAGGTGGCTACGTCTCCGAACTCACGACC |
| | GAAAAGATCAAGAGCAGCCCGCATGGATTTGACTTGGTCAGGGCCGAGCCTACATGTGCGAATGATGCCCATACTTGAGCCACCTAACTTTGTTTTAG |
| | GGCGACTGCCCTGCTGCGTAACATCGTTGCTGCTGCGTAACATCGTTGCTGCTCCATAACATCAAACATCGACCCACGGCGTAACGCGCTTGCTGCTT |
| | GGATGCCCGAGGCATAGACTGTACAAAAAAACAGTCATAACAAGCCATGAAAACCGCCACTGCGCCGTTACCACCGCTGCGTTCGGTCAAGGTTCTGG |
| | ACCAGTTGCGTGAGCGCATACGCTACTTGCATTACAGTTTACGAACCGAACAGGCTTATGTCAACTGGGTTCGTGCCTTCATCCGTTTCCACGGTGTG |
| | CGTCACCCGGCAACCTTGGGCAGCAGCGAAGTCGAGGCATTTCTGTCCTGGCTGGCGAACGAGCGCAAGGTTTCGGTCTCCACGCATCGTCAGGCATT |
| | GGCGGCCTTGCTGTTCTTCTACGGCAAGGTGCTGTGCACGGATCTGCCCTGGCTTCAGGAGATCGGAAGACCTCGGCCGTCGCGGCGCTTGCCGGTGG |
| | TGCTGACCCCGGATGAAGTGGTTCGCATCCTCGGTTTTCTGGAAGGCGAGCATCGTTTGTTCGCCCAGGACTCTAGCTATAGTTCTAGTGGTTGGCTA |
| | CGTATACTCCGGAATATTAATAGATCATGGAGATAATTAAAATGATAACCATCTCGCAAATAAATAAGTATTTTACTGTTTTCGTAACAGTTTTGTAA |
| | TAAAAAAACCTATAAATATTCCGGATTATTCATACCGTCCCACCATCGGGCGCGGATCTCGGTCCGAAACCATGTCGTACTACCATCACCATCACCAT |
| | CACGATTACGATATCCCAACGACCGAAAACCTGTATTTTCAGGGCGCCATGGGATCC |
| ceDNAFVIII- | GGCCGGCCCCTGCAGGCAGCTGCGCGCTCGCTCGCTCACTGAGGCCGCCCGGGCAAAGCCCGGGCGTCGGGCGACCTTTGGTCGCCCGGCCTCAGTGA |
| vector 17 | GCGAGCGAGCGCGCAGAGAGGGAGTGGCCAACTCCATCACTAGGGGTTCCTTGTAGTTAATGATTAACCCGCCATGCTACTTATCTACGTAGCCATGC |
| (SEQ ID NO: | TCTAGAAGGCTCAGAGGCACACAGGAGTTTCTGGGCTCACCCTGCCCCCTTCCAACCCCTCAGTTCCCATCCTCCAGCAGCTGTTTGTGTGCTGCCTC |
| 208) | TGAAGTCCACACTGAACAAACTTCAGCCTACTCATGTCCCTAAAATGGGCAAACATTGCAAGCAGCAAACAGCAAACACACAGCCCTCCCTGCCTGCT |
| | GACCTTGGAGCTGGGGCAGAGGTCAGAGACCTCTCTGGGCCCATGCCACCTCCAACATCCACTCGACCCCTTGGAATTTCGGTGGAGAGGAGCAGAGG |
| | TTGTCCTGGCGTGGTTTAGGTAGTGTGAGAGGGTCCGGGTTCAAAACCACTTGCTGGGTGGGGAGTCGTCAGTAAGTGGCTATGCCCCGACCCCGAAG |
| | CCTGTTTCCCCATCTGTACAATGGAAATGATAAAGACGCCCATCTGATAGGGTTTTTGTGGCAAATAAACATTTGGTTTTTTTGTTTTGTTTTGTTTT |
| | GTTTTTTGAGATGGAGGTTTGCTCTGTCGCCCAGGCTGGAGTGCAGTGACACAATCTCATCTCACCACAACCTTCCCCTGCCTCAGCCTCCCAAGTAG |
| | CTGGGATTACAAGCATGTGCCACCACACCTGGCTAATTTTCTATTTTTAGTAGAGACGGGTTTCTCCATGTTGGTCAGCCTCAGCCTCCCAAGTAACT |
| | GGGATTACAGGCCTGTGCCACCACACCCGGCTAATTTTTTCTATTTTTGACAGGGACGGGGTTTCACCATGTTGGTCAGGCTGGTCTAGAGGTACCGG |
| | ATCTTGCTACCAGTGGAACAGCCACTAAGGATTCTGCAGTGAGAGCAGAGGGCCAGCTAAGTGGTACTCTCCCAGAGACTGTCTGACTCACGCCACCC |
| | CCTCCACCTTGGACACAGGACGCTGTGGTTTCTGAGCCAGGTACAATGACTCCTTTCGGTAAGTGCAGTGGAAGCTGTACACTGCCCAGGCAAAGCGT |
| | CCGGGCAGCGTAGGCGGGCGACTCAGATCCCAGCCAGTGGACTTAGCCCCTGTTTGCTCCTCCGATAACTGGGGTGACCTTGGTTAATATTCACCAGC |
| | AGCCTCCCCCGTTGCCCCTCTGGATCCACTGCTTAAATACGGACGAGGACAGGGCCCTGTCTCCTCAGCTTCAGGCACCACCACTGACCTGGGACAGT |
| | GAATCCGGACTCTAAGGTAAATATAAAATTTTTAAGTGTATAATGTGTTAAACTACTGATTCTAATTGTTTCTCTCTTTTAGATTCCAACCTTTGGAA |
| | CTGAGTTTAAACGCCGCCACCATGCAGATTGAGCTGAGCACCTGCTTCTTCCTGTGCCTGCTGAGGTTCTGCTTCTCTGCCACCAGGAGATACTACCT |
| | GGGGGCTGTGGAGCTGAGCTGGGACTACATGCAGTCTGACCTGGGGGAGCTGCCTGTGGATGCCAGGTTCCCCCCCAGAGTGCCCAAGAGCTTCCCCT |
| | TCAACACCTCTGTGGTGTACAAGAAGACCCTGTTTGTGGAGTTCACTGACCACCTGTTCAACATTGCCAAGCCCAGGCCCCCCTGGATGGGCCTGCTG |
| | GGCCCCACCATCCAGGCTGAGGTGTATGACACTGTGGTGATCACCCTGAAGAACATGGCCAGCCACCCTGTGAGCCTGCATGCTGTGGGGGTGAGCTA |
| | CTGGAAGGCCTCTGAGGGGGCTGAGTATGATGACCAGACCAGCCAGAGGGAGAAGGAGGATGACAAGGTGTTCCCTGGGGGCAGCCACACCTATGTGT |
| | GGCAGGTGCTGAAGGAGAATGGCCCCATGGCCTCTGACCCCCTGTGCCTGACCTACAGCTACCTGAGCCATGTGGACCTGGTGAAGGACCTGAACTCT |
| | GGCCTGATTGGGGCCCTGCTGGTGTGCAGGGAGGGCAGCCTGGCCAAGGAGAAGACCCAGACCCTGCACAAGTTCATCCTGCTGTTTGCTGTGTTTGA |
| | TGAGGGCAAGAGCTGGCACTCTGAAACCAAGAACAGCCTGATGCAGGACAGGGATGCTGCCTCTGCCAGGGCCTGGCCCAAGATGCACACTGTGAATG |
| | GCTATGTGAACAGGAGCCTGCCTGGCCTGATTGGCTGCCACAGGAAGTCTGTGTACTGGCATGTGATTGGCATGGGCACCACCCCTGAGGTGCACAGC |
| | ATCTTCCTGGAGGGCCACACCTTCCTGGTCAGGAACCACAGGCAGGCCAGCCTGGAGATCAGCCCCATCACCTTCCTGACTGCCCAGACCCTGCTGAT |
| | GGACCTGGGCCAGTTCCTGCTGTTCTGCCACATCAGCAGCCACCAGCATGATGGCATGGAGGCCTATGTGAAGGTGGACAGCTGCCCTGAGGAGCCCC |
| | AGCTGAGGATGAAGAACAATGAGGAGGCTGAGGACTATGATGATGACCTGACTGACTCTGAGATGGATGTGGTGAGGTTTGATGATGACAACAGCCCC |
| | AGCTTCATCCAGATCAGGTCTGTGGCCAAGAAGCACCCCAAGACCTGGGTGCACTACATTGCTGCTGAGGAGGAGGACTGGGACTATGCCCCCCTGGT |
| | GCTGGCCCCTGATGACAGGAGCTACAAGAGCCAGTACCTGAACAATGGCCCCCAGAGGATTGGCAGGAAGTACAAGAAGGTCAGGTTCATGGCCTACA |
| | CTGATGAAACCTTCAAGACCAGGGAGGCCATCCAGCATGAGTCTGGCATCCTGGGCCCCCTGCTGTATGGGGAGGTGGGGGACACCCTGCTGATCATC |
| | TTCAAGAACCAGGCCAGCAGGCCCTACAACATCTACCCCCATGGCATCACTGATGTGAGGCCCCTGTACAGCAGGAGGCTGCCCAAGGGGGTGAAGCA |
| | CCTGAAGGACTTCCCCATCCTGCCTGGGGAGATCTTCAAGTACAAGTGGACTGTGACTGTGGAGGATGGCCCCACCAAGTCTGACCCCAGGTGCCTGA |
| | CCAGATACTACAGCAGCTTTGTGAACATGGAGAGGGACCTGGCCTCTGGCCTGATTGGCCCCCTGCTGATCTGCTACAAGGAGTCTGTGGACCAGAGG |
| | GGCAACCAGATCATGTCTGACAAGAGGAATGTGATCCTGTTCTCTGTGTTTGATGAGAACAGGAGCTGGTACCTGACTGAGAACATCCAGAGGTTCCT |
| | GCCCAACCCTGCTGGGGTGCAGCTGGAGGACCCTGAGTTCCAGGCCAGCAACATCATGCACAGCATCAATGGCTATGTGTTTGACAGCCTGCAGCTGT |
| | CTGTGTGCCTGCATGAGGTGGCCTACTGGTACATCCTGAGCATTGGGGCCCAGACTGACTTCCTGTCTGTGTTCTTCTCTGGCTACACCTTCAAGCAC |
| | AAGATGGTGTATGAGGACACCCTGACCCTGTTCCCCTTCTCTGGGGAGACTGTGTTCATGAGCATGGAGAACCCTGGCCTGTGGATTCTGGGCTGCCA |
| | CAACTCTGACTTCAGGAACAGGGGCATGACTGCCCTGCTGAAAGTCTCCAGCTGTGACAAGAACACTGGGGACTACTATGAGGACAGCTATGAGGACA |
| | TCTCTGCCTACCTGCTGAGCAAGAACAATGCCATTGAGCCCAGGAGCTTCAGCCAGAATGCCACTAATGTGTCTAACAACAGCAACACCAGCAATGAC |
| | AGCAATGTGTCTCCCCCAGTGCTGAAGAGGCACCAGAGGGAGATCACCAGGACCACCCTGCAGTCTGACCAGGAGGAGATTGACTATGATGACACCAT |
| | CTCTGTGGAGATGAAGAAGGAGGACTTTGACATCTACGACGAGGACGAGAACCAGAGCCCCAGGAGCTTCCAGAAGAAGACCAGGCACTACTTCATTG |
| | CTGCTGTGGAGAGGCTGTGGGACTATGGCATGAGCAGCAGCCCCCATGTGCTGAGGAACAGGGCCCAGTCTGGCTCTGTGCCCCAGTTCAAGAAGGTG |
| | GTGTTCCAGGAGTTCACTGATGGCAGCTTCACCCAGCCCCTGTACAGAGGGGAGCTGAATGAGCACCTGGGCCTGCTGGGCCCCTACATCAGGGCTGA |
| | GGTGGAGGACAACATCATGGTGACCTTCAGGAACCAGGCCAGCAGGCCCTACAGCTTCTACAGCAGCCTGATCAGCTATGAGGAGGACCAGAGGCAGG |
| | GGGCTGAGCCCAGGAAGAACTTTGTGAAGCCCAATGAAACCAAGACCTACTTCTGGAAGGTGCAGCACCACATGGCCCCCACCAAGGATGAGTTTGAC |
| | TGCAAGGCCTGGGCCTACTTCTCTGATGTGGACCTGGAGAAGGATGTGCACTCTGGCCTGATTGGCCCCCTGCTGGTGTGCCACACCAACACCCTGAA |
| | CCCTGCCCATGGCAGGCAGGTGACTGTGCAGGAGTTTGCCCTGTTCTTCACCATCTTTGATGAAACCAAGAGCTGGTACTTCACTGAGAACATGGAGA |
| | GGAACTGCAGGGCCCCCTGCAACATCCAGATGGAGGACCCCACCTTCAAGGAGAACTACAGGTTCCATGCCATCAATGGCTACATCATGGACACCCTG |
| | CCTGGCCTGGTGATGGCCCAGGACCAGAGGATCAGGTGGTACCTGCTGAGCATGGGCAGCAATGAGAACATCCACAGCATCCACTTCTCTGGCCATGT |
| | GTTCACTGTGAGGAAGAAGGAGGAGTACAAGATGGCCCTGTACAACCTGTACCCTGGGGTGTTTGAGACTGTGGAGATGCTGCCCAGCAAGGCTGGCA |
| | TCTGGAGGGTGGAGTGCCTGATTGGGGAGCACCTGCATGCTGGCATGAGCACCCTGTTCCTGGTGTACAGCAACAAGTGCCAGACCCCCCTGGGCATG |
| | GCCTCTGGCCACATCAGGGACTTCCAGATCACTGCCTCTGGCCAGTATGGCCAGTGGGCCCCCAAGCTGGCCAGGCTGCACTACTCTGGCAGCATCAA |
| | TGCCTGGAGCACCAAGGAGCCCTTCAGCTGGATCAAGGTGGACCTGCTGGCCCCCATGATCATCCATGGCATCAAGACCCAGGGGGCCAGGCAGAAGT |
| | TCAGCAGCCTGTACATCAGCCAGTTCATCATCATGTACAGCCTGGATGGCAAGAAGTGGCAGACCTACAGGGGCAACAGCACTGGCACCCTGATGGTG |
| | TTCTTTGGCAATGTGGACAGCTCTGGCATCAAGCACAACATCTTCAACCCCCCCATCATTGCCAGATACATCAGGCTGCACCCCACCCACTACAGCAT |
| | CAGGAGCACCCTGAGGATGGAGCTGATGGGCTGTGACCTGAACAGCTGCAGCATGCCCCTGGGCATGGAGAGCAAGGCCATCTCTGATGCCCAGATCA |
| | CTGCCAGCAGCTACTTCACCAACATGTTTGCCACCTGGAGCCCCAGCAAGGCCAGGCTGCACCTGCAGGGCAGGAGCAATGCCTGGAGGCCCCAGGTC |
| | AACAACCCCAAGGAGTGGCTGCAGGTGGACTTCCAGAAGACCATGAAGGTGACTGGGGTGACCACCCAGGGGGTGAAGAGCCTGCTGACCAGCATGTA |
| | TGTGAAGGAGTTCCTGATCAGCAGCAGCCAGGATGGCCACCAGTGGACCCTGTTCTTCCAGAATGGCAAGGTGAAGGTGTTCCAGGGCAACCAGGACA |
| | GCTTCACCCCTGTGGTGAACAGCCTGGACCCCCCCCTGCTGACCAGATACCTGAGGATTCACCCCCAGAGCTGGGTGCACCAGATTGCCCTGAGGATG |
| | GAGGTGCTGGGCTGTGAGGCCCAGGACCTGTACTGATTAATTAAGAGCATCTTACCGCCATTTATTCCCATATTTGTTCTGTTTTTCTTGATTTGGGT |
| | ATACATTTAAATGTTAATAAAACAAAATGGTGGGGCAATCATTTACATTTTTAGGGATATGTAATTACTAGTTCAGGTGTATTGCCACAAGACAAACA |
| | TGTTAAGAAACTTTCCCGTTATTTACGCTCTGTTCCTGTTAATCAACCTCTGGATTACAAAATTTGTGAAAGATTGACTGATATTCTTAACTATGTTG |
| | CTCCTTTTACGCTGTGTGGATATGCTGCTTTATAGCCTCTGTATCTAGCTATTGCTTCCCGTACGGCTTTCGTTTTCTCCTCCTTGTATAAATCCTGG |
| | TTGCTGTCTCTTTTAGAGGAGTTGTGGCCCGTTGTCCGTCAACGTGGCGTGGTGTGCTCTGTGTTTGCTGACGCAACCCCCACTGGCTGGGGCATTGC |
| | CACCACCTGTCAACTCCTTTCTGGGACTTTCGCTTTCCCCCTCCCGATCGCCACGGCAGAACTCATCGCCGCCTGCCTTGCCCGCTGCTGGACAGGGG |
| | CTAGGTTGCTGGGCACTGATAATTCCGTGGTGTTGTCTCCATAAAGTAGGAAACACTACACGATTCCATAAAGTAGGAAACACTACATCACTCCATAA |
| | AGTAGGAAACACTACATGTGCCTTCTAGTTGCCAGCCATCTGTTGTTTGCCCCTCCCCCGTGCCTTCCTTGACCCTGGAAGGTGCCACTCCCACTGTC |
| | CTTTCCTAATAAAATGAGGAAATTGCATCGCATTGTCTGAGTAGGTGTCATTCTATTCTGGGGGGTGGGGTGGGGCAGGACAGCAAGGGGGAGGATTG |
| | GGAAGACAATAGCAGGCATGCTGGGGATGCGGTGGGCTCTATGGCTCTAGAGCATGGCTACGTAGATAAGTAGCATGGCGGGTTAATCATTAACTACA |
| | CCTGCAGGAGGAACCCCTAGTGATGGAGTTGGCCACTCCCTCTCTGCGCGCTCGCTCGCTCACTGAGGCCGGGCGACCAAAGGTCGCCCGACGCCCGG |
| | GCGGCCTCAGTGAGCGAGCGAGCGCGCAGCTGCCTGCAGGGGCGCGCCTCGAGGCATGCGGTACCAAGCTTGTCGAGAAGTACTAGAGGATCATAATC |
| | AGCCATACCACATTTGTAGAGGTTTTACTTGCTTTAAAAAACCTCCCACACCTCCCCCTGAACCTGAAACATAAAATGAATGCAATTGTTGTTGTTAA |
| | CTTGTTTATTGCAGCTTATAATGGTTACAAATAAAGCAATAGCATCACAAATTTCACAAATAAAGCATTTTTTTCACTGCATTCTAGTTGTGGTTTGT |
| | CCAAACTCATCAATGTATCTTATCATGTCTGGATCTGATCACTGATATCGCCTAGGAGATCCGAACCAGATAAGTGAAATCTAGTTCCAAACTATTTT |
| | GTCATTTTTAATTTTCGTATTAGCTTACGACGCTACACCCAGTTCCCATCTATTTTGTCACTCTTCCCTAAATAATCCTTAAAAACTCCATTTCCACC |
| | CCTCCCAGTTCCCAACTATTTTGTCCGCCCACAGCGGGGCATTTTTCTTCCTGTTATGTTTTTAATCAAACATCCTGCCAACTCCATGTGACAAACCG |
| | TCATCTTCGGCTACTTTTTCTCTGTCACAGAATGAAAATTTTTCTGTCATCTCTTCGTTATTAATGTTTGTAATTGACTGAATATCAACGCTTATTTG |
| | CAGCCTGAATGGCGAATGGGACGCGCCCTGTAGCGGCGCATTAAGCGCGGCGGGTGTGGTGGTTACGCGCAGCGTGACCGCTACACTTGCCAGCGCCC |
| | TAGCGCCCGCTCCTTTCGCTTTCTTCCCTTCCTTTCTCGCCACGTTCGCCGGCTTTCCCCGTCAAGCTCTAAATCGGGGGCTCCCTTTAGGGTTCCGA |
| | TTTAGTGCTTTACGGCACCTCGACCCCAAAAAACTTGATTAGGGTGATGGTTCACGTAGTGGGCCATCGCCCTGATAGACGGTTTTTCGCCCTTTGAC |
| | GTTGGAGTCCACGTTCTTTAATAGTGGACTCTTGTTCCAAACTGGAACAACACTCAACCCTATCTCGGTCTATTCTTTTGATTTATAAGGGATTTTGC |
| | CGATTTCGGCCTATTGGTTAAAAAATGAGCTGATTTAACAAAAATTTAACGCGAATTTTAACAAAATATTAACGTTTACAATTTCAGGTGGCACTTTT |
| | CGGGGAAATGTGCGCGGAACCCCTATTTGTTTATTTTTCTAAATACATTCAAATATGTATCCGCTCATGAGACAATAACCCTGATAAATGCTTCAATA |
| | ATATTGAAAAAGGAAGAGTATGAGTATTCAACATTTCCGTGTCGCCCTTATTCCCTTTTTTGCGGCATTTTGCCTTCCTGTTTTTGCTCACCCAGAAA |
| | CGCTGGTGAAAGTAAAAGATGCTGAAGATCAGTTGGGTGCACGAGTGGGTTACATCGAACTGGATCTCAACAGCGGTAAGATCCTTGAGAGTTTTCGC |
| | CCCGAAGAACGTTTTCCAATGATGAGCACTTTTAAAGTTCTGCTATGTGGCGCGGTATTATCCCGTATTGACGCCGGGCAAGAGCAACTCGGTCGCCG |
| | CATACACTATTCTCAGAATGACTTGGTTGAGTACTCACCAGTCACAGAAAAGCATCTTACGGATGGCATGACAGTAAGAGAATTATGCAGTGCTGCCA |
| | TAACCATGAGTGATAACACTGCGGCCAACTTACTTCTGACAACGATCGGAGGACCGAAGGAGCTAACCGCTTTTTTGCACAACATGGGGGATCATGTA |
| | ACTCGCCTTGATCGTTGGGAACCGGAGCTGAATGAAGCCATACCAAACGACGAGCGTGACACCACGATGCCTGTAGCAATGGCAACAACGTTGCGCAA |
| | ACTATTAACTGGCGAACTACTTACTCTAGCTTCCCGGCAACAATTAATAGACTGGATGGAGGCGGATAAAGTTGCAGGACCACTTCTGCGCTCGGCCC |
| | TTCCGGCTGGCTGGTTTATTGCTGATAAATCTGGAGCCGGTGAGCGTGGGTCTCGCGGTATCATTGCAGCACTGGGGCCAGATGGTAAGCCCTCCCGT |
| | ATCGTAGTTATCTACACGACGGGGAGTCAGGCAACTATGGATGAACGAAATAGACAGATCGCTGAGATAGGTGCCTCACTGATTAAGCATTGGTAACT |
| | GTCAGACCAAGTTTACTCATATATACTTTAGATTGATTTAAAACTTCATTTTTAATTTAAAAGGATCTAGGTGAAGATCCTTTTTGATAATCTCATGA |
| | CCAAAATCCCTTAACGTGAGTTTTCGTTCCACTGAGCGTCAGACCCCGTAGAAAAGATCAAAGGATCTTCTTGAGATCCTTTTTTTCTGCGCGTAATC |
| | TGCTGCTTGCAAACAAAAAAACCACCGCTACCAGCGGTGGTTTGTTTGCCGGATCAAGAGCTACCAACTCTTTTTCCGAAGGTAACTGGCTTCAGCAG |
| | AGCGCAGATACCAAATACTGTCCTTCTAGTGTAGCCGTAGTTAGGCCACCACTTCAAGAACTCTGTAGCACCGCCTACATACCTCGCTCTGCTAATCC |
| | TGTTACCAGTGGCTGCTGCCAGTGGCGATAAGTCGTGTCTTACCGGGTTGGACTCAAGACGATAGTTACCGGATAAGGCGCAGCGGTCGGGCTGAACG |
| | GGGGGTTCGTGCACACAGCCCAGCTTGGAGCGAACGACCTACACCGAACTGAGATACCTACAGCGTGAGCATTGAGAAAGCGCCACGCTTCCCGAAGG |
| | GAGAAAGGCGGACAGGTATCCGGTAAGCGGCAGGGTCGGAACAGGAGAGCGCACGAGGGAGCTTCCAGGGGGAAACGCCTGGTATCTTTATAGTCCTG |
| | TCGGGTTTCGCCACCTCTGACTTGAGCGTCGATTTTTGTGATGCTCGTCAGGGGGGCGGAGCCTATGGAAAAACGCCAGCAACGCGGCCTTTTTACGG |
| | TTCCTGGCCTTTTGCTGGCCTTTTGCTCACATGTTCTTTCCTGCGTTATCCCCTGATTCTGTGGATAACCGTATTACCGCCTTTGAGTGAGCTGATAC |
| | CGCTCGCCGCAGCCGAACGACCGAGCGCAGCGAGTCAGTGAGCGAGGAAGCGGAAGAGCGCCTGATGCGGTATTTTCTCCTTACGCATCTGTGCGGTA |
| | TTTCACACCGCAGACCAGCCGCGTAACCTGGCAAAATCGGTTACGGTTGAGTAATAAATGGATGCCCTGCGTAAGCGGGTGTGGGCGGACAATAAAGT |
| | CTTAAACTGAACAAAATAGATCTAAACTATGACAATAAAGTCTTAAACTAGACAGAATAGTTGTAAACTGAAATCAGTCCAGTTATGCTGTGAAAAAG |
| | CATACTGGACTTTTGTTATGGCTAAAGCAAACTCTTCATTTTCTGAAGTGCAAATTGCCCGTCGTATTAAAGAGGGGCGTGGCCAAGGGCATGGTAAA |
| | GACTATATTCGCGGCGTTGTGACAATTTACCGAACAACTCCGCGGCCGGGAAGCCGATCTCGGCTTGAACGAATTGTTAGGTGGCGGTACTTGGGTCG |
| | ATATCAAAGTGCATCACTTCTTCCCGTATGCCCAACTTTGTATAGAGAGCCACTGCGGGATCGTCACCGTAATCTGCTTGCACGTAGATCACATAAGC |
| | ACCAAGCGCGTTGGCCTCATGCTTGAGGAGATTGATGAGCGCGGTGGCAATGCCCTGCCTCCGGTGCTCGCCGGAGACTGCGAGATCATAGATATAGA |
| | TCTCACTACGCGGCTGCTCAAACCTGGGCAGAACGTAAGCCGCGAGAGCGCCAACAACCGCTTCTTGGTCGAAGGCAGCAAGCGCGATGAATGTCTTA |
| | CTACGGAGCAAGTTCCCGAGGTAATCGGAGTCCGGCTGATGTTGGGAGTAGGTGGCTACGTCTCCGAACTCACGACCGAAAAGATCAAGAGCAGCCCG |
| | CATGGATTTGACTTGGTCAGGGCCGAGCCTACATGTGCGAATGATGCCCATACTTGAGCCACCTAACTTTGTTTTAGGGCGACTGCCCTGCTGCGTAA |
| | CATCGTTGCTGCTGCGTAACATCGTTGCTGCTCCATAACATCAAACATCGACCCACGGCGTAACGCGCTTGCTGCTTGGATGCCCGAGGCATAGACTG |
| | TACAAAAAAACAGTCATAACAAGCCATGAAAACCGCCACTGCGCCGTTACCACCGCTGCGTTCGGTCAAGGTTCTGGACCAGTTGCGTGAGCGCATAC |
| | GCTACTTGCATTACAGTTTACGAACCGAACAGGCTTATGTCAACTGGGTTCGTGCCTTCATCCGTTTCCACGGTGTGCGTCACCCGGCAACCTTGGGC |
| | AGCAGCGAAGTCGAGGCATTTCTGTCCTGGCTGGCGAACGAGCGCAAGGTTTCGGTCTCCACGCATCGTCAGGCATTGGCGGCCTTGCTGTTCTTCTA |
| | CGGCAAGGTGCTGTGCACGGATCTGCCCTGGCTTCAGGAGATCGGAAGACCTCGGCCGTCGCGGCGCTTGCCGGTGGTGCTGACCCCGGATGAAGTGG |
| | TTCGCATCCTCGGTTTTCTGGAAGGCGAGCATCGTTTGTTCGCCCAGGACTCTAGCTATAGTTCTAGTGGTTGGCTACGTATACTCCGGAATATTAAT |
| | AGATCATGGAGATAATTAAAATGATAACCATCTCGCAAATAAATAAGTATTTTACTGTTTTCGTAACAGTTTTGTAATAAAAAAACCTATAAATATTC |
| | CGGATTATTCATACCGTCCCACCATCGGGCGCGGATCTCGGTCCGAAACCATGTCGTACTACCATCACCATCACCATCACGATTACGATATCCCAACG |
| | ACCGAAAACCTGTATTTTCAGGGCGCCATGGGATCC |
| ceDNAFVII- | GGCCGGCCCCTGCAGGCAGCTGCGCGCTCGCTCGCTCACTGAGGCCGCCCGGGCAAAGCCCGGGCGTCGGGCGACCTTTGGTCGCCCGGCCTCAGTGA |
| vector 18 | GCGAGCGAGCGCGCAGAGAGGGAGTGGCCAACTCCATCACTAGGGGTTCCTTGTAGTTAATGATTAACCCGCCATGCTACTTATCTACGTAGCCATGC |
| (SEQ ID NO: | TCTAGACGGGGGAGGCTGCTGGTGAATATTAACCAAGGTCACCCCAGTTATCGGAGGAGCAAACAGGGGCTAAGTCCACACGCGTGGTACCGTCTGTC |
| 209) | TGCACATTTCGTAGAGCGAGTGTTCCGATACTCTAATCTCCCTAGGCAAGGTTCATATTTGTGTAGGTTACTTATTCTCCTTTTGTTGACTAAGTCAA |
| | TAATCAGAATCAGCAGGTTTGGAGTCAGCTTGGCAGGGATCAGCAGCCTGGGTTGGAAGGAGGGGGTATAAAAGCCCCTTCACCAGGAGAAGCCGTCA |
| | CACAGATCCACAAGCTCCTGAAGAGGTAAGGGTTTAAGGGATGGTTGGTTGGTGGGGTATTAATGTTTAATTACCTGGAGCACCTGCCTGAAATCACT |
| | TTTTTTCAGGTTGGTTTAAACGCCGCCACCATGCAGATCGAGCTGTCTACCTGCTTCTTCCTGTGCCTGCTGCGGTTCTGCTTCAGCGCCACCAGAAG |
| | ATATTACCTGGGCGCCGTGGAACTGAGCTGGGACTACATGCAGTCTGACCTGGGAGAGCTGCCCGTGGACGCTAGATTTCCTCCAAGAGTGCCCAAGA |
| | GCTTCCCCTTCAACACCTCCGTGGTGTACAAGAAAACCCTGTTCGTGGAATTCACCGACCACCTGTTCAATATCGCCAAGCCTCGGCCTCCTTGGATG |
| | GGACTGCTGGGACCTACAATTCAGGCCGAGGTGTACGACACCGTGGTCATCACCCTGAAGAACATGGCCAGCCATCCTGTGTCTCTGCACGCCGTGGG |
| | AGTGTCTTATTGGAAGGCTTCTGAGGGCGCCGAGTACGACGATCAGACAAGCCAGAGAGAGAAAGAGGACGACAAGGTTTTCCCTGGCGGCAGCCACA |
| | CCTATGTCTGGCAGGTCCTGAAAGAAAACGGCCCTATGGCCTCCGATCCTCTGTGCCTGACATACAGCTACCTGAGCCACGTGGACCTGGTCAAGGAC |
| | CTGAATTCTGGCCTGATCGGAGCCCTGCTCGTGTGTAGAGAAGGCAGCCTGGCCAAAGAGAAAACCCAGACACTGCACAAGTTCATCCTGCTGTTCGC |
| | CGTGTTCGACGAGGGCAAGAGCTGGCACAGCGAGACAAAGAACAGCCTGATGCAGGACAGGGATGCCGCCTCTGCTAGAGCTTGGCCTAAGATGCACA |
| | CCGTGAACGGCTACGTGAACAGAAGCCTGCCTGGACTGATCGGCTGCCACAGAAAGTCCGTGTACTGGCACGTGATCGGCATGGGCACAACACCTGAG |
| | GTGCACAGCATCTTTCTGGAAGGCCACACCTTCCTCGTGCGGAACCACAGACAGGCCAGCCTGGAAATCAGCCCTATCACCTTCCTGACCGCTCAGAC |
| | CCTGCTGATGGATCTGGGCCAGTTTCTGCTGTTCTGCCACATCAGCTCCCACCAGCACGATGGCATGGAAGCCTACGTGAAGGTGGACAGCTGCCCCG |
| | AAGAACCCCAGCTGCGGATGAAGAACAACGAGGAAGCCGAGGACTACGACGACGACCTGACCGACTCTGAGATGGACGTCGTCAGATTCGACGACGAT |
| | AACAGCCCCAGCTTCATCCAGATCAGAAGCGTGGCCAAGAAGCACCCCAAGACCTGGGTGCACTATATCGCCGCCGAGGAAGAGGACTGGGATTACGC |
| | TCCTCTGGTGCTGGCCCCTGACGACAGAAGCTACAAGAGCCAGTACCTGAACAACGGCCCTCAGCGGATCGGCCGGAAGTATAAGAAAGTGCGGTTCA |
| | TGGCCTACACCGACGAGACATTCAAGACCAGAGAGGCCATCCAGCACGAGAGCGGAATTCTGGGCCCTCTGCTGTATGGCGAAGTGGGCGATACACTG |
| | CTGATCATCTTCAAGAACCAGGCCAGCAGACCCTACAACATCTACCCTCACGGCATCACCGATGTGCGGCCCCTGTATTCTAGAAGGCTGCCCAAGGG |
| | CGTGAAGCACCTGAAGGACTTCCCTATCCTGCCTGGCGAGATTTTCAAGTACAAGTGGACCGTGACCGTGGAAGATGGCCCCACCAAGAGCGACCCTA |
| | GATGTCTGACACGGTACTACAGCAGCTTCGTGAACATGGAACGCGACCTGGCCAGCGGCCTGATTGGACCTCTGCTGATCTGCTACAAAGAAAGCGTG |
| | GACCAGCGGGGCAACCAGATCATGAGCGACAAGCGGAACGTGATCCTGTTTAGCGTGTTCGATGAGAACCGGTCCTGGTATCTGACCGAGAACATCCA |
| | GCGGTTTCTGCCCAATCCTGCCGGGGTGCAACTGGAAGATCCTGAGTTCCAGGCAAGCAACATCATGCACTCCATCAATGGCTATGTGTTCGACAGCC |
| | TGCAGCTGAGCGTGTGCCTGCACGAAGTGGCCTACTGGTACATCCTGAGCATTGGCGCCCAGACCGACTTCCTGTCCGTGTTCTTTAGCGGCTACACC |
| | TTCAAGCACAAGATGGTGTACGAGGATACCCTGACACTGTTCCCATTCAGCGGCGAGACAGTGTTCATGAGCATGGAAAACCCCGGCCTGTGGATTCT |
| | GGGCTGTCACAACAGCGACTTCCGGAACAGAGGCATGACAGCCCTGCTGAAGGTGTCCAGCTGCGACAAGAACACCGGCGACTACTACGAGGACAGCT |
| | ATGAGGACATCAGCGCCTACCTGCTGAGCAAGAACAATGCCATCGAGCCTCGGAGCTTCAGCCAGAATCCTCCTGTGCTGAAGCGGCACCAGCGCGAG |
| | ATCACCAGAACAACCCTGCAGAGCGACCAAGAGGAAATCGATTACGACGACACCATCAGCGTCGAGATGAAGAAAGAAGATTTCGACATCTACGACGA |
| | GGACGAGAATCAGAGCCCCAGAAGCTTTCAGAAAAAGACCCGGCACTACTTCATTGCCGCCGTCGAGAGACTGTGGGACTACGGCATGTCTAGCAGCC |
| | CTCACGTGCTGAGAAATAGAGCCCAGAGCGGCAGCGTGCCCCAGTTCAAGAAAGTGGTGTTCCAAGAGTTCACCGACGGCAGCTTCACCCAGCCACTG |
| | TATAGAGGCGAGCTGAACGAGCATCTGGGCCTGCTGGGCCCTTATATCAGAGCCGAAGTGGAAGATAACATCATGGTCACCTTCCGGAATCAGGCTAG |
| | CCGGCCTTACAGCTTCTACAGCTCCCTGATCAGCTACGAAGAGGACCAGAGACAGGGCGCTGAGCCCAGAAAGAACTTCGTGAAGCCCAACGAGACTA |
| | AGACCTACTTTTGGAAGGTGCAGCACCACATGGCCCCTACAAAGGACGAGTTCGACTGCAAAGCCTGGGCCTACTTCTCCGATGTGGATCTGGAAAAG |
| | GACGTGCACAGCGGGCTCATCGGACCACTGCTTGTGTGCCACACCAACACACTGAACCCCGCTCACGGCAGACAAGTGACAGTGCAAGAGTTCGCCCT |
| | GTTCTTCACCATCTTCGACGAAACAAAGAGCTGGTACTTCACCGAGAATATGGAACGGAACTGCAGAGCCCCTTGCAACATCCAGATGGAAGATCCCA |
| | CCTTCAAAGAGAACTACCGGTTCCACGCCATCAACGGCTACATCATGGACACACTGCCCGGCCTGGTTATGGCCCAGGATCAGAGAATCCGGTGGTAT |
| | CTGCTGTCCATGGGCTCCAACGAGAATATCCACAGCATCCACTTCAGCGGCCACGTGTTCACCGTGCGGAAAAAAGAAGAGTACAAAATGGCCCTGTA |
| | CAATCTGTACCCTGGGGTGTTCGAAACCGTGGAAATGCTGCCTTCCAAGGCCGGCATTTGGAGAGTGGAATGTCTGATTGGAGAGCACCTCCACGCCG |
| | GAATGAGCACCCTGTTTCTGGTGTACAGCAACAAGTGTCAGACCCCTCTCGGCATGGCCTCTGGACACATCAGAGACTTCCAGATCACCGCCTCTGGC |
| | CAGTACGGACAGTGGGCTCCTAAACTGGCTCGGCTGCACTACAGCGGCAGCATCAATGCCTGGTCCACCAAAGAGCCCTTCAGCTGGATCAAGGTGGA |
| | CCTGCTGGCTCCCATGATCATCCACGGAATCAAGACCCAGGGCGCCAGACAGAAGTTCAGCAGCCTGTACATCAGCCAGTTCATCATCATGTACAGCC |
| | TGGACGGCAAGAAGTGGCAGACCTACAGAGGCAACAGCACCGGCACACTCATGGTGTTCTTCGGCAACGTGGACTCCAGCGGCATTAAGCACAACATC |
| | TTCAACCCTCCAATCATTGCCCGGTACATCCGGCTGCACCCCACACACTACAGCATCCGGTCTACCCTGAGAATGGAACTGATGGGCTGCGACCTGAA |
| | CAGCTGCTCTATGCCCCTCGGAATGGAAAGCAAGGCCATCAGCGACGCCCAGATCACAGCCAGCAGCTACTTCACCAACATGTTCGCCACTTGGAGCC |
| | CCTCCAAGGCTAGACTGCATCTGCAGGGCAGAAGCAACGCTTGGAGGCCCCAAGTGAACAACCCCAAAGAGTGGCTGCAGGTTGACTTTCAAAAGACC |
| | ATGAAAGTGACCGGCGTGACCACACAGGGCGTCAAGTCTCTGCTGACCTCTATGTACGTGAAAGAGTTCCTGATCTCCAGCAGCCAGGACGGCCATCA |
| | GTGGACCCTGTTTTTCCAGAACGGCAAAGTGAAAGTGTTCCAGGGCAATCAGGACAGCTTCACACCCGTGGTCAATTCTCTGGACCCTCCACTGCTGA |
| | CCAGATACCTGCGGATTCACCCTCAGTCTTGGGTGCACCAGATCGCTCTGCGGATGGAAGTGCTGGGCTGTGAAGCTCAGGACCTCTACTAGTTAATT |
| | AAGAGCATCTTACCGCCATTTATTCCCATATTTGTTCTGTTTTTCTTGATTTGGGTATACATTTAAATGTTAATAAAACAAAATGGTGGGGCAATCAT |
| | TTACATTTTTAGGGATATGTAATTACTAGTTCAGGTGTATTGCCACAAGACAAACATGTTAAGAAACTTTCCCGTTATTTACGCTCTGTTCCTGTTAA |
| | TCAACCTCTGGATTACAAAATTTGTGAAAGATTGACTGATATTCTTAACTATGTTGCTCCTTTTACGCTGTGTGGATATGCTGCTTTATAGCCTCTGT |
| | ATCTAGCTATTGCTTCCCGTACGGCTTTCGTTTTCTCCTCCTTGTATAAATCCTGGTTGCTGTCTCTTTTAGAGGAGTTGTGGCCCGTTGTCCGTCAA |
| | CGTGGCGTGGTGTGCTCTGTGTTTGCTGACGCAACCCCCACTGGCTGGGGCATTGCCACCACCTGTCAACTCCTTTCTGGGACTTTCGCTTTCCCCCT |
| | CCCGATCGCCACGGCAGAACTCATCGCCGCCTGCCTTGCCCGCTGCTGGACAGGGGCTAGGTTGCTGGGCACTGATAATTCCGTGGTGTTGTCTGTGC |
| | CTTCTAGTTGCCAGCCATCTGTTGTTTGCCCCTCCCCCGTGCCTTCCTTGACCCTGGAAGGTGCCACTCCCACTGTCCTTTCCTAATAAAATGAGGAA |
| | ATTGCATCGCATTGTCTGAGTAGGTGTCATTCTATTCTGGGGGGTGGGGTGGGGCAGGACAGCAAGGGGGAGGATTGGGAAGACAATAGCAGGCATGC |
| | TGGGGATGCGGTGGGCTCTATGGCTCTAGAGCATGGCTACGTAGATAAGTAGCATGGCGGGTTAATCATTAACTACACCTGCAGGAGGAACCCCTAGT |
| | GATGGAGTTGGCCACTCCCTCTCTGCGCGCTCGCTCGCTCACTGAGGCCGGGCGACCAAAGGTCGCCCGACGCCCGGGCGGCCTCAGTGAGCGAGCGA |
| | GCGCGCAGCTGCCTGCAGGGGCGCGCCTCGAGGCATGCGGTACCAAGCTTGTCGAGAAGTACTAGAGGATCATAATCAGCCATACCACATTTGTAGAG |
| | GTTTTACTTGCTTTAAAAAACCTCCCACACCTCCCCCTGAACCTGAAACATAAAATGAATGCAATTGTTGTTGTTAACTTGTTTATTGCAGCTTATAA |
| | TGGTTACAAATAAAGCAATAGCATCACAAATTTCACAAATAAAGCATTTTTTTCACTGCATTCTAGTTGTGGTTTGTCCAAACTCATCAATGTATCTT |
| | ATCATGTCTGGATCTGATCACTGATATCGCCTAGGAGATCCGAACCAGATAAGTGAAATCTAGTTCCAAACTATTTTGTCATTTTTAATTTTCGTATT |
| | AGCTTACGACGCTACACCCAGTTCCCATCTATTTTGTCACTCTTCCCTAAATAATCCTTAAAAACTCCATTTCCACCCCTCCCAGTTCCCAACTATTT |
| | TGTCCGCCCACAGCGGGGCATTTTTCTTCCTGTTATGTTTTTAATCAAACATCCTGCCAACTCCATGTGACAAACCGTCATCTTCGGCTACTTTTTCT |
| | CTGTCACAGAATGAAAATTTTTCTGTCATCTCTTCGTTATTAATGTTTGTAATTGACTGAATATCAACGCTTATTTGCAGCCTGAATGGCGAATGGGA |
| | CGCGCCCTGTAGCGGCGCATTAAGCGCGGCGGGTGTGGTGGTTACGCGCAGCGTGACCGCTACACTTGCCAGCGCCCTAGCGCCCGCTCCTTTCGCTT |
| | TCTTCCCTTCCTTTCTCGCCACGTTCGCCGGCTTTCCCCGTCAAGCTCTAAATCGGGGGCTCCCTTTAGGGTTCCGATTTAGTGCTTTACGGCACCTC |
| | GACCCCAAAAAACTTGATTAGGGTGATGGTTCACGTAGTGGGCCATCGCCCTGATAGACGGTTTTTCGCCCTTTGACGTTGGAGTCCACGTTCTTTAA |
| | TAGTGGACTCTTGTTCCAAACTGGAACAACACTCAACCCTATCTCGGTCTATTCTTTTGATTTATAAGGGATTTTGCCGATTTCGGCCTATTGGTTAA |
| | AAAATGAGCTGATTTAACAAAAATTTAACGCGAATTTTAACAAAATATTAACGTTTACAATTTCAGGTGGCACTTTTCGGGGAAATGTGCGCGGAACC |
| | CCTATTTGTTTATTTTTCTAAATACATTCAAATATGTATCCGCTCATGAGACAATAACCCTGATAAATGCTTCAATAATATTGAAAAAGGAAGAGTAT |
| | GAGTATTCAACATTTCCGTGTCGCCCTTATTCCCTTTTTTGCGGCATTTTGCCTTCCTGTTTTTGCTCACCCAGAAACGCTGGTGAAAGTAAAAGATG |
| | CTGAAGATCAGTTGGGTGCACGAGTGGGTTACATCGAACTGGATCTCAACAGCGGTAAGATCCTTGAGAGTTTTCGCCCCGAAGAACGTTTTCCAATG |
| | ATGAGCACTTTTAAAGTTCTGCTATGTGGCGCGGTATTATCCCGTATTGACGCCGGGCAAGAGCAACTCGGTCGCCGCATACACTATTCTCAGAATGA |
| | CTTGGTTGAGTACTCACCAGTCACAGAAAAGCATCTTACGGATGGCATGACAGTAAGAGAATTATGCAGTGCTGCCATAACCATGAGTGATAACACTG |
| | CGGCCAACTTACTTCTGACAACGATCGGAGGACCGAAGGAGCTAACCGCTTTTTTGCACAACATGGGGGATCATGTAACTCGCCTTGATCGTTGGGAA |
| | CCGGAGCTGAATGAAGCCATACCAAACGACGAGCGTGACACCACGATGCCTGTAGCAATGGCAACAACGTTGCGCAAACTATTAACTGGCGAACTACT |
| | TACTCTAGCTTCCCGGCAACAATTAATAGACTGGATGGAGGCGGATAAAGTTGCAGGACCACTTCTGCGCTCGGCCCTTCCGGCTGGCTGGTTTATTG |
| | CTGATAAATCTGGAGCCGGTGAGCGTGGGTCTCGCGGTATCATTGCAGCACTGGGGCCAGATGGTAAGCCCTCCCGTATCGTAGTTATCTACACGACG |
| | GGGAGTCAGGCAACTATGGATGAACGAAATAGACAGATCGCTGAGATAGGTGCCTCACTGATTAAGCATTGGTAACTGTCAGACCAAGTTTACTCATA |
| | TATACTTTAGATTGATTTAAAACTTCATTTTTAATTTAAAAGGATCTAGGTGAAGATCCTTTTTGATAATCTCATGACCAAAATCCCTTAACGTGAGT |
| | TTTCGTTCCACTGAGCGTCAGACCCCGTAGAAAAGATCAAAGGATCTTCTTGAGATCCTTTTTTTCTGCGCGTAATCTGCTGCTTGCAAACAAAAAAA |
| | CCACCGCTACCAGCGGTGGTTTGTTTGCCGGATCAAGAGCTACCAACTCTTTTTCCGAAGGTAACTGGCTTCAGCAGAGCGCAGATACCAAATACTGT |
| | CCTTCTAGTGTAGCCGTAGTTAGGCCACCACTTCAAGAACTCTGTAGCACCGCCTACATACCTCGCTCTGCTAATCCTGTTACCAGTGGCTGCTGCCA |
| | GTGGCGATAAGTCGTGTCTTACCGGGTTGGACTCAAGACGATAGTTACCGGATAAGGCGCAGCGGTCGGGCTGAACGGGGGGTTCGTGCACACAGCCC |
| | AGCTTGGAGCGAACGACCTACACCGAACTGAGATACCTACAGCGTGAGCATTGAGAAAGCGCCACGCTTCCCGAAGGGAGAAAGGCGGACAGGTATCC |
| | GGTAAGCGGCAGGGTCGGAACAGGAGAGCGCACGAGGGAGCTTCCAGGGGGAAACGCCTGGTATCTTTATAGTCCTGTCGGGTTTCGCCACCTCTGAC |
| | TTGAGCGTCGATTTTTGTGATGCTCGTCAGGGGGGCGGAGCCTATGGAAAAACGCCAGCAACGCGGCCTTTTTACGGTTCCTGGCCTTTTGCTGGCCT |
| | TTTGCTCACATGTTCTTTCCTGCGTTATCCCCTGATTCTGTGGATAACCGTATTACCGCCTTTGAGTGAGCTGATACCGCTCGCCGCAGCCGAACGAC |
| | CGAGCGCAGCGAGTCAGTGAGCGAGGAAGCGGAAGAGCGCCTGATGCGGTATTTTCTCCTTACGCATCTGTGCGGTATTTCACACCGCAGACCAGCCG |
| | CGTAACCTGGCAAAATCGGTTACGGTTGAGTAATAAATGGATGCCCTGCGTAAGCGGGTGTGGGCGGACAATAAAGTCTTAAACTGAACAAAATAGAT |
| | CTAAACTATGACAATAAAGTCTTAAACTAGACAGAATAGTTGTAAACTGAAATCAGTCCAGTTATGCTGTGAAAAAGCATACTGGACTTTTGTTATGG |
| | CTAAAGCAAACTCTTCATTTTCTGAAGTGCAAATTGCCCGTCGTATTAAAGAGGGGCGTGGCCAAGGGCATGGTAAAGACTATATTCGCGGCGTTGTG |
| | ACAATTTACCGAACAACTCCGCGGCCGGGAAGCCGATCTCGGCTTGAACGAATTGTTAGGTGGCGGTACTTGGGTCGATATCAAAGTGCATCACTTCT |
| | TCCCGTATGCCCAACTTTGTATAGAGAGCCACTGCGGGATCGTCACCGTAATCTGCTTGCACGTAGATCACATAAGCACCAAGCGCGTTGGCCTCATG |
| | CTTGAGGAGATTGATGAGCGCGGTGGCAATGCCCTGCCTCCGGTGCTCGCCGGAGACTGCGAGATCATAGATATAGATCTCACTACGCGGCTGCTCAA |
| | ACCTGGGCAGAACGTAAGCCGCGAGAGCGCCAACAACCGCTTCTTGGTCGAAGGCAGCAAGCGCGATGAATGTCTTACTACGGAGCAAGTTCCCGAGG |
| | TAATCGGAGTCCGGCTGATGTTGGGAGTAGGTGGCTACGTCTCCGAACTCACGACCGAAAAGATCAAGAGCAGCCCGCATGGATTTGACTTGGTCAGG |
| | GCCGAGCCTACATGTGCGAATGATGCCCATACTTGAGCCACCTAACTTTGTTTTAGGGCGACTGCCCTGCTGCGTAACATCGTTGCTGCTGCGTAACA |
| | TCGTTGCTGCTCCATAACATCAAACATCGACCCACGGCGTAACGCGCTTGCTGCTTGGATGCCCGAGGCATAGACTGTACAAAAAAACAGTCATAACA |
| | AGCCATGAAAACCGCCACTGCGCCGTTACCACCGCTGCGTTCGGTCAAGGTTCTGGACCAGTTGCGTGAGCGCATACGCTACTTGCATTACAGTTTAC |
| | GAACCGAACAGGCTTATGTCAACTGGGTTCGTGCCTTCATCCGTTTCCACGGTGTGCGTCACCCGGCAACCTTGGGCAGCAGCGAAGTCGAGGCATTT |
| | CTGTCCTGGCTGGCGAACGAGCGCAAGGTTTCGGTCTCCACGCATCGTCAGGCATTGGCGGCCTTGCTGTTCTTCTACGGCAAGGTGCTGTGCACGGA |
| | TCTGCCCTGGCTTCAGGAGATCGGAAGACCTCGGCCGTCGCGGCGCTTGCCGGTGGTGCTGACCCCGGATGAAGTGGTTCGCATCCTCGGTTTTCTGG |
| | AAGGCGAGCATCGTTTGTTCGCCCAGGACTCTAGCTATAGTTCTAGTGGTTGGCTACGTATACTCCGGAATATTAATAGATCATGGAGATAATTAAAA |
| | TGATAACCATCTCGCAAATAAATAAGTATTTTACTGTTTTCGTAACAGTTTTGTAATAAAAAAACCTATAAATATTCCGGATTATTCATACCGTCCCA |
| | CCATCGGGCGCGGATCTCGGTCCGAAACCATGTCGTACTACCATCACCATCACCATCACGATTACGATATCCCAACGACCGAAAACCTGTATTTTCAG |
| | GGCGCCATGGGATCC |
| ceDNAFVIII- | GGCCGGCCCCTGCAGGCAGCTGCGCGCTCGCTCGCTCACTGAGGCCGCCCGGGCAAAGCCCGGGCGTCGGGCGACCTTTGGTCGCCCGGCCTCAGTGA |
| vector 19 | GCGAGCGAGCGCGCAGAGAGGGAGTGGCCAACTCCATCACTAGGGGTTCCTTGTAGTTAATGATTAACCCGCCATGCTACTTATCTACGTAGCCATGC |
| (SEQ ID NO: | TCTAGACGGGGGAGGCTGCTGGTGAATATTAACCAAGGTCACCCCAGTTATCGGAGGAGCAAACAGGGGCTAAGTCCACACGCGTGGTACCGTCTGTC |
| 210) | TGCACATTTCGTAGAGCGAGTGTTCCGATACTCTAATCTCCCTAGGCAAGGTTCATATTTGTGTAGGTTACTTATTCTCCTTTTGTTGACTAAGTCAA |
| | TAATCAGAATCAGCAGGTTTGGAGTCAGCTTGGCAGGGATCAGCAGCCTGGGTTGGAAGGAGGGGGTATAAAAGCCCCTTCACCAGGAGAAGCCGTCA |
| | CACAGATCCACAAGCTCCTGAAGAGGTAAGGGTTTAAGGGATGGTTGGTTGGTGGGGTATTAATGTTTAATTACCTGGAGCACCTGCCTGAAATCACT |
| | TTTTTTCAGGTTGGTTTAAACGCCGCCACCATGCAGATTGAGCTGAGCACCTGCTTCTTCCTGTGCCTGCTGAGGTTCTGCTTCTCTGCCACCAGGAG |
| | ATACTACCTGGGGGCTGTGGAGCTGAGCTGGGACTACATGCAGTCTGACCTGGGGGAGCTGCCTGTGGATGCCAGGTTCCCCCCCAGAGTGCCCAAGA |
| | GCTTCCCCTTCAACACCTCTGTGGTGTACAAGAAGACCCTGTTTGTGGAGTTCACTGACCACCTGTTCAACATTGCCAAGCCCAGGCCCCCCTGGATG |
| | GGCCTGCTGGGCCCCACCATCCAGGCTGAGGTGTATGACACTGTGGTGATCACCCTGAAGAACATGGCCAGCCACCCTGTGAGCCTGCATGCTGTGGG |
| | GGTGAGCTACTGGAAGGCCTCTGAGGGGGCTGAGTATGATGACCAGACCAGCCAGAGGGAGAAGGAGGATGACAAGGTGTTCCCTGGGGGCAGCCACA |
| | CCTATGTGTGGCAGGTGCTGAAGGAGAATGGCCCCATGGCCTCTGACCCCCTGTGCCTGACCTACAGCTACCTGAGCCATGTGGACCTGGTGAAGGAC |
| | CTGAACTCTGGCCTGATTGGGGCCCTGCTGGTGTGCAGGGAGGGCAGCCTGGCCAAGGAGAAGACCCAGACCCTGCACAAGTTCATCCTGCTGTTTGC |
| | TGTGTTTGATGAGGGCAAGAGCTGGCACTCTGAAACCAAGAACAGCCTGATGCAGGACAGGGATGCTGCCTCTGCCAGGGCCTGGCCCAAGATGCACA |
| | CTGTGAATGGCTATGTGAACAGGAGCCTGCCTGGCCTGATTGGCTGCCACAGGAAGTCTGTGTACTGGCATGTGATTGGCATGGGCACCACCCCTGAG |
| | GTGCACAGCATCTTCCTGGAGGGCCACACCTTCCTGGTCAGGAACCACAGGCAGGCCAGCCTGGAGATCAGCCCCATCACCTTCCTGACTGCCCAGAC |
| | CCTGCTGATGGACCTGGGCCAGTTCCTGCTGTTCTGCCACATCAGCAGCCACCAGCATGATGGCATGGAGGCCTATGTGAAGGTGGACAGCTGCCCTG |
| | AGGAGCCCCAGCTGAGGATGAAGAACAATGAGGAGGCTGAGGACTATGATGATGACCTGACTGACTCTGAGATGGATGTGGTGAGGTTTGATGATGAC |
| | AACAGCCCCAGCTTCATCCAGATCAGGTCTGTGGCCAAGAAGCACCCCAAGACCTGGGTGCACTACATTGCTGCTGAGGAGGAGGACTGGGACTATGC |
| | CCCCCTGGTGCTGGCCCCTGATGACAGGAGCTACAAGAGCCAGTACCTGAACAATGGCCCCCAGAGGATTGGCAGGAAGTACAAGAAGGTCAGGTTCA |
| | TGGCCTACACTGATGAAACCTTCAAGACCAGGGAGGCCATCCAGCATGAGTCTGGCATCCTGGGCCCCCTGCTGTATGGGGAGGTGGGGGACACCCTG |
| | CTGATCATCTTCAAGAACCAGGCCAGCAGGCCCTACAACATCTACCCCCATGGCATCACTGATGTGAGGCCCCTGTACAGCAGGAGGCTGCCCAAGGG |
| | GGTGAAGCACCTGAAGGACTTCCCCATCCTGCCTGGGGAGATCTTCAAGTACAAGTGGACTGTGACTGTGGAGGATGGCCCCACCAAGTCTGACCCCA |
| | GGTGCCTGACCAGATACTACAGCAGCTTTGTGAACATGGAGAGGGACCTGGCCTCTGGCCTGATTGGCCCCCTGCTGATCTGCTACAAGGAGTCTGTG |
| | GACCAGAGGGGCAACCAGATCATGTCTGACAAGAGGAATGTGATCCTGTTCTCTGTGTTTGATGAGAACAGGAGCTGGTACCTGACTGAGAACATCCA |
| | GAGGTTCCTGCCCAACCCTGCTGGGGTGCAGCTGGAGGACCCTGAGTTCCAGGCCAGCAACATCATGCACAGCATCAATGGCTATGTGTTTGACAGCC |
| | TGCAGCTGTCTGTGTGCCTGCATGAGGTGGCCTACTGGTACATCCTGAGCATTGGGGCCCAGACTGACTTCCTGTCTGTGTTCTTCTCTGGCTACACC |
| | TTCAAGCACAAGATGGTGTATGAGGACACCCTGACCCTGTTCCCCTTCTCTGGGGAGACTGTGTTCATGAGCATGGAGAACCCTGGCCTGTGGATTCT |
| | GGGCTGCCACAACTCTGACTTCAGGAACAGGGGCATGACTGCCCTGCTGAAAGTCTCCAGCTGTGACAAGAACACTGGGGACTACTATGAGGACAGCT |
| | ATGAGGACATCTCTGCCTACCTGCTGAGCAAGAACAATGCCATTGAGCCCAGGAGCTTCAGCCAGAATGCCACTAATGTGTCTAACAACAGCAACACC |
| | AGCAATGACAGCAATGTGTCTCCCCCAGTGCTGAAGAGGCACCAGAGGGAGATCACCAGGACCACCCTGCAGTCTGACCAGGAGGAGATTGACTATGA |
| | TGACACCATCTCTGTGGAGATGAAGAAGGAGGACTTTGACATCTACGACGAGGACGAGAACCAGAGCCCCAGGAGCTTCCAGAAGAAGACCAGGCACT |
| | ACTTCATTGCTGCTGTGGAGAGGCTGTGGGACTATGGCATGAGCAGCAGCCCCCATGTGCTGAGGAACAGGGCCCAGTCTGGCTCTGTGCCCCAGTTC |
| | AAGAAGGTGGTGTTCCAGGAGTTCACTGATGGCAGCTTCACCCAGCCCCTGTACAGAGGGGAGCTGAATGAGCACCTGGGCCTGCTGGGCCCCTACAT |
| | CAGGGCTGAGGTGGAGGACAACATCATGGTGACCTTCAGGAACCAGGCCAGCAGGCCCTACAGCTTCTACAGCAGCCTGATCAGCTATGAGGAGGACC |
| | AGAGGCAGGGGGCTGAGCCCAGGAAGAACTTTGTGAAGCCCAATGAAACCAAGACCTACTTCTGGAAGGTGCAGCACCACATGGCCCCCACCAAGGAT |
| | GAGTTTGACTGCAAGGCCTGGGCCTACTTCTCTGATGTGGACCTGGAGAAGGATGTGCACTCTGGCCTGATTGGCCCCCTGCTGGTGTGCCACACCAA |
| | CACCCTGAACCCTGCCCATGGCAGGCAGGTGACTGTGCAGGAGTTTGCCCTGTTCTTCACCATCTTTGATGAAACCAAGAGCTGGTACTTCACTGAGA |
| | ACATGGAGAGGAACTGCAGGGCCCCCTGCAACATCCAGATGGAGGACCCCACCTTCAAGGAGAACTACAGGTTCCATGCCATCAATGGCTACATCATG |
| | GACACCCTGCCTGGCCTGGTGATGGCCCAGGACCAGAGGATCAGGTGGTACCTGCTGAGCATGGGCAGCAATGAGAACATCCACAGCATCCACTTCTC |
| | TGGCCATGTGTTCACTGTGAGGAAGAAGGAGGAGTACAAGATGGCCCTGTACAACCTGTACCCTGGGGTGTTTGAGACTGTGGAGATGCTGCCCAGCA |
| | AGGCTGGCATCTGGAGGGTGGAGTGCCTGATTGGGGAGCACCTGCATGCTGGCATGAGCACCCTGTTCCTGGTGTACAGCAACAAGTGCCAGACCCCC |
| | CTGGGCATGGCCTCTGGCCACATCAGGGACTTCCAGATCACTGCCTCTGGCCAGTATGGCCAGTGGGCCCCCAAGCTGGCCAGGCTGCACTACTCTGG |
| | CAGCATCAATGCCTGGAGCACCAAGGAGCCCTTCAGCTGGATCAAGGTGGACCTGCTGGCCCCCATGATCATCCATGGCATCAAGACCCAGGGGGCCA |
| | GGCAGAAGTTCAGCAGCCTGTACATCAGCCAGTTCATCATCATGTACAGCCTGGATGGCAAGAAGTGGCAGACCTACAGGGGCAACAGCACTGGCACC |
| | CTGATGGTGTTCTTTGGCAATGTGGACAGCTCTGGCATCAAGCACAACATCTTCAACCCCCCCATCATTGCCAGATACATCAGGCTGCACCCCACCCA |
| | CTACAGCATCAGGAGCACCCTGAGGATGGAGCTGATGGGCTGTGACCTGAACAGCTGCAGCATGCCCCTGGGCATGGAGAGCAAGGCCATCTCTGATG |
| | CCCAGATCACTGCCAGCAGCTACTTCACCAACATGTTTGCCACCTGGAGCCCCAGCAAGGCCAGGCTGCACCTGCAGGGCAGGAGCAATGCCTGGAGG |
| | CCCCAGGTCAACAACCCCAAGGAGTGGCTGCAGGTGGACTTCCAGAAGACCATGAAGGTGACTGGGGTGACCACCCAGGGGGTGAAGAGCCTGCTGAC |
| | CAGCATGTATGTGAAGGAGTTCCTGATCAGCAGCAGCCAGGATGGCCACCAGTGGACCCTGTTCTTCCAGAATGGCAAGGTGAAGGTGTTCCAGGGCA |
| | ACCAGGACAGCTTCACCCCTGTGGTGAACAGCCTGGACCCCCCCCTGCTGACCAGATACCTGAGGATTCACCCCCAGAGCTGGGTGCACCAGATTGCC |
| | CTGAGGATGGAGGTGCTGGGCTGTGAGGCCCAGGACCTGTACTGATTAATTAAGAGCATCTTACCGCCATTTATTCCCATATTTGTTCTGTTTTTCTT |
| | GATTTGGGTATACATTTAAATGTTAATAAAACAAAATGGTGGGGCAATCATTTACATTTTTAGGGATATGTAATTACTAGTTCAGGTGTATTGCCACA |
| | AGACAAACATGTTAAGAAACTTTCCCGTTATTTACGCTCTGTTCCTGTTAATCAACCTCTGGATTACAAAATTTGTGAAAGATTGACTGATATTCTTA |
| | ACTATGTTGCTCCTTTTACGCTGTGTGGATATGCTGCTTTATAGCCTCTGTATCTAGCTATTGCTTCCCGTACGGCTTTCGTTTTCTCCTCCTTGTAT |
| | AAATCCTGGTTGCTGTCTCTTTTAGAGGAGTTGTGGCCCGTTGTCCGTCAACGTGGCGTGGTGTGCTCTGTGTTTGCTGACGCAACCCCCACTGGCTG |
| | GGGCATTGCCACCACCTGTCAACTCCTTTCTGGGACTTTCGCTTTCCCCCTCCCGATCGCCACGGCAGAACTCATCGCCGCCTGCCTTGCCCGCTGCT |
| | GGACAGGGGCTAGGTTGCTGGGCACTGATAATTCCGTGGTGTTGTCTGTGCCTTCTAGTTGCCAGCCATCTGTTGTTTGCCCCTCCCCCGTGCCTTCC |
| | TTGACCCTGGAAGGTGCCACTCCCACTGTCCTTTCCTAATAAAATGAGGAAATTGCATCGCATTGTCTGAGTAGGTGTCATTCTATTCTGGGGGGTGG |
| | GGTGGGGCAGGACAGCAAGGGGGAGGATTGGGAAGACAATAGCAGGCATGCTGGGGATGCGGTGGGCTCTATGGCTCTAGAGCATGGCTACGTAGATA |
| | AGTAGCATGGCGGGTTAATCATTAACTACACCTGCAGGAGGAACCCCTAGTGATGGAGTTGGCCACTCCCTCTCTGCGCGCTCGCTCGCTCACTGAGG |
| | CCGGGCGACCAAAGGTCGCCCGACGCCCGGGCGGCCTCAGTGAGCGAGCGAGCGCGCAGCTGCCTGCAGGGGCGCGCCTCGAGGCATGCGGTACCAAG |
| | CTTGTCGAGAAGTACTAGAGGATCATAATCAGCCATACCACATTTGTAGAGGTTTTACTTGCTTTAAAAAACCTCCCACACCTCCCCCTGAACCTGAA |
| | ACATAAAATGAATGCAATTGTTGTTGTTAACTTGTTTATTGCAGCTTATAATGGTTACAAATAAAGCAATAGCATCACAAATTTCACAAATAAAGCAT |
| | TTTTTTCACTGCATTCTAGTTGTGGTTTGTCCAAACTCATCAATGTATCTTATCATGTCTGGATCTGATCACTGATATCGCCTAGGAGATCCGAACCA |
| | GATAAGTGAAATCTAGTTCCAAACTATTTTGTCATTTTTAATTTTCGTATTAGCTTACGACGCTACACCCAGTTCCCATCTATTTTGTCACTCTTCCC |
| | TAAATAATCCTTAAAAACTCCATTTCCACCCCTCCCAGTTCCCAACTATTTTGTCCGCCCACAGCGGGGCATTTTTCTTCCTGTTATGTTTTTAATCA |
| | AACATCCTGCCAACTCCATGTGACAAACCGTCATCTTCGGCTACTTTTTCTCTGTCACAGAATGAAAATTTTTCTGTCATCTCTTCGTTATTAATGTT |
| | TGTAATTGACTGAATATCAACGCTTATTTGCAGCCTGAATGGCGAATGGGACGCGCCCTGTAGCGGCGCATTAAGCGCGGCGGGTGTGGTGGTTACGC |
| | GCAGCGTGACCGCTACACTTGCCAGCGCCCTAGCGCCCGCTCCTTTCGCTTTCTTCCCTTCCTTTCTCGCCACGTTCGCCGGCTTTCCCCGTCAAGCT |
| | CTAAATCGGGGGCTCCCTTTAGGGTTCCGATTTAGTGCTTTACGGCACCTCGACCCCAAAAAACTTGATTAGGGTGATGGTTCACGTAGTGGGCCATC |
| | GCCCTGATAGACGGTTTTTCGCCCTTTGACGTTGGAGTCCACGTTCTTTAATAGTGGACTCTTGTTCCAAACTGGAACAACACTCAACCCTATCTCGG |
| | TCTATTCTTTTGATTTATAAGGGATTTTGCCGATTTCGGCCTATTGGTTAAAAAATGAGCTGATTTAACAAAAATTTAACGCGAATTTTAACAAAATA |
| | TTAACGTTTACAATTTCAGGTGGCACTTTTCGGGGAAATGTGCGCGGAACCCCTATTTGTTTATTTTTCTAAATACATTCAAATATGTATCCGCTCAT |
| | GAGACAATAACCCTGATAAATGCTTCAATAATATTGAAAAAGGAAGAGTATGAGTATTCAACATTTCCGTGTCGCCCTTATTCCCTTTTTTGCGGCAT |
| | TTTGCCTTCCTGTTTTTGCTCACCCAGAAACGCTGGTGAAAGTAAAAGATGCTGAAGATCAGTTGGGTGCACGAGTGGGTTACATCGAACTGGATCTC |
| | AACAGCGGTAAGATCCTTGAGAGTTTTCGCCCCGAAGAACGTTTTCCAATGATGAGCACTTTTAAAGTTCTGCTATGTGGCGCGGTATTATCCCGTAT |
| | TGACGCCGGGCAAGAGCAACTCGGTCGCCGCATACACTATTCTCAGAATGACTTGGTTGAGTACTCACCAGTCACAGAAAAGCATCTTACGGATGGCA |
| | TGACAGTAAGAGAATTATGCAGTGCTGCCATAACCATGAGTGATAACACTGCGGCCAACTTACTTCTGACAACGATCGGAGGACCGAAGGAGCTAACC |
| | GCTTTTTTGCACAACATGGGGGATCATGTAACTCGCCTTGATCGTTGGGAACCGGAGCTGAATGAAGCCATACCAAACGACGAGCGTGACACCACGAT |
| | GCCTGTAGCAATGGCAACAACGTTGCGCAAACTATTAACTGGCGAACTACTTACTCTAGCTTCCCGGCAACAATTAATAGACTGGATGGAGGCGGATA |
| | AAGTTGCAGGACCACTTCTGCGCTCGGCCCTTCCGGCTGGCTGGTTTATTGCTGATAAATCTGGAGCCGGTGAGCGTGGGTCTCGCGGTATCATTGCA |
| | GCACTGGGGCCAGATGGTAAGCCCTCCCGTATCGTAGTTATCTACACGACGGGGAGTCAGGCAACTATGGATGAACGAAATAGACAGATCGCTGAGAT |
| | AGGTGCCTCACTGATTAAGCATTGGTAACTGTCAGACCAAGTTTACTCATATATACTTTAGATTGATTTAAAACTTCATTTTTAATTTAAAAGGATCT |
| | AGGTGAAGATCCTTTTTGATAATCTCATGACCAAAATCCCTTAACGTGAGTTTTCGTTCCACTGAGCGTCAGACCCCGTAGAAAAGATCAAAGGATCT |
| | TCTTGAGATCCTTTTTTTCTGCGCGTAATCTGCTGCTTGCAAACAAAAAAACCACCGCTACCAGCGGTGGTTTGTTTGCCGGATCAAGAGCTACCAAC |
| | TCTTTTTCCGAAGGTAACTGGCTTCAGCAGAGCGCAGATACCAAATACTGTCCTTCTAGTGTAGCCGTAGTTAGGCCACCACTTCAAGAACTCTGTAG |
| | CACCGCCTACATACCTCGCTCTGCTAATCCTGTTACCAGTGGCTGCTGCCAGTGGCGATAAGTCGTGTCTTACCGGGTTGGACTCAAGACGATAGTTA |
| | CCGGATAAGGCGCAGCGGTCGGGCTGAACGGGGGGTTCGTGCACACAGCCCAGCTTGGAGCGAACGACCTACACCGAACTGAGATACCTACAGCGTGA |
| | GCATTGAGAAAGCGCCACGCTTCCCGAAGGGAGAAAGGCGGACAGGTATCCGGTAAGCGGCAGGGTCGGAACAGGAGAGCGCACGAGGGAGCTTCCAG |
| | GGGGAAACGCCTGGTATCTTTATAGTCCTGTCGGGTTTCGCCACCTCTGACTTGAGCGTCGATTTTTGTGATGCTCGTCAGGGGGGCGGAGCCTATGG |
| | AAAAACGCCAGCAACGCGGCCTTTTTACGGTTCCTGGCCTTTTGCTGGCCTTTTGCTCACATGTTCTTTCCTGCGTTATCCCCTGATTCTGTGGATAA |
| | CCGTATTACCGCCTTTGAGTGAGCTGATACCGCTCGCCGCAGCCGAACGACCGAGCGCAGCGAGTCAGTGAGCGAGGAAGCGGAAGAGCGCCTGATGC |
| | GGTATTTTCTCCTTACGCATCTGTGCGGTATTTCACACCGCAGACCAGCCGCGTAACCTGGCAAAATCGGTTACGGTTGAGTAATAAATGGATGCCCT |
| | GCGTAAGCGGGTGTGGGCGGACAATAAAGTCTTAAACTGAACAAAATAGATCTAAACTATGACAATAAAGTCTTAAACTAGACAGAATAGTTGTAAAC |
| | TGAAATCAGTCCAGTTATGCTGTGAAAAAGCATACTGGACTTTTGTTATGGCTAAAGCAAACTCTTCATTTTCTGAAGTGCAAATTGCCCGTCGTATT |
| | AAAGAGGGGCGTGGCCAAGGGCATGGTAAAGACTATATTCGCGGCGTTGTGACAATTTACCGAACAACTCCGCGGCCGGGAAGCCGATCTCGGCTTGA |
| | ACGAATTGTTAGGTGGCGGTACTTGGGTCGATATCAAAGTGCATCACTTCTTCCCGTATGCCCAACTTTGTATAGAGAGCCACTGCGGGATCGTCACC |
| | GTAATCTGCTTGCACGTAGATCACATAAGCACCAAGCGCGTTGGCCTCATGCTTGAGGAGATTGATGAGCGCGGTGGCAATGCCCTGCCTCCGGTGCT |
| | CGCCGGAGACTGCGAGATCATAGATATAGATCTCACTACGCGGCTGCTCAAACCTGGGCAGAACGTAAGCCGCGAGAGCGCCAACAACCGCTTCTTGG |
| | TCGAAGGCAGCAAGCGCGATGAATGTCTTACTACGGAGCAAGTTCCCGAGGTAATCGGAGTCCGGCTGATGTTGGGAGTAGGTGGCTACGTCTCCGAA |
| | CTCACGACCGAAAAGATCAAGAGCAGCCCGCATGGATTTGACTTGGTCAGGGCCGAGCCTACATGTGCGAATGATGCCCATACTTGAGCCACCTAACT |
| | TTGTTTTAGGGCGACTGCCCTGCTGCGTAACATCGTTGCTGCTGCGTAACATCGTTGCTGCTCCATAACATCAAACATCGACCCACGGCGTAACGCGC |
| | TTGCTGCTTGGATGCCCGAGGCATAGACTGTACAAAAAAACAGTCATAACAAGCCATGAAAACCGCCACTGCGCCGTTACCACCGCTGCGTTCGGTCA |
| | AGGTTCTGGACCAGTTGCGTGAGCGCATACGCTACTTGCATTACAGTTTACGAACCGAACAGGCTTATGTCAACTGGGTTCGTGCCTTCATCCGTTTC |
| | CACGGTGTGCGTCACCCGGCAACCTTGGGCAGCAGCGAAGTCGAGGCATTTCTGTCCTGGCTGGCGAACGAGCGCAAGGTTTCGGTCTCCACGCATCG |
| | TCAGGCATTGGCGGCCTTGCTGTTCTTCTACGGCAAGGTGCTGTGCACGGATCTGCCCTGGCTTCAGGAGATCGGAAGACCTCGGCCGTCGCGGCGCT |
| | TGCCGGTGGTGCTGACCCCGGATGAAGTGGTTCGCATCCTCGGTTTTCTGGAAGGCGAGCATCGTTTGTTCGCCCAGGACTCTAGCTATAGTTCTAGT |
| | GGTTGGCTACGTATACTCCGGAATATTAATAGATCATGGAGATAATTAAAATGATAACCATCTCGCAAATAAATAAGTATTTTACTGTTTTCGTAACA |
| | GTTTTGTAATAAAAAAACCTATAAATATTCCGGATTATTCATACCGTCCCACCATCGGGCGCGGATCTCGGTCCGAAACCATGTCGTACTACCATCAC |
| | CATCACCATCACGATTACGATATCCCAACGACCGAAAACCTGTATTTTCAGGGCGCCATGGGATCC |
| ceDNAFVIII- | GGCCGGCCCCTGCAGGCAGCTGCGCGCTCGCTCGCTCACTGAGGCCGCCCGGGCAAAGCCCGGGCGTCGGGCGACCTTTGGTCGCCCGGCCTCAGTGA |
| vector 20 | GCGAGCGAGCGCGCAGAGAGGGAGTGGCCAACTCCATCACTAGGGGTTCCTTGTAGTTAATGATTAACCCGCCATGCTACTTATCTACGTAGCCATGC |
| (SEQ ID NO: | TCTAGACGGGGGAGGCTGCTGGTGAATATTAACCAAGGTCACCCCAGTTATCGGAGGAGCAAACAGGGGCTAAGTCCACACGCGTGGTACCGTCTGTC |
| 211) | TGCACATTTCGTAGAGCGAGTGTTCCGATACTCTAATCTCCCTAGGCAAGGTTCATATTTGTGTAGGTTACTTATTCTCCTTTTGTTGACTAAGTCAA |
| | TAATCAGAATCAGCAGGTTTGGAGTCAGCTTGGCAGGGATCAGCAGCCTGGGTTGGAAGGAGGGGGTATAAAAGCCCCTTCACCAGGAGAAGCCGTCA |
| | CACAGATCCACAAGCTCCTGAAGAGGTAAGGGTTTAAGGGATGGTTGGTTGGTGGGGTATTAATGTTTAATTACCTGGAGCACCTGCCTGAAATCACT |
| | TTTTTTCAGGTTGGTTTAAACGCCGCCACCATGCAGATTGAGCTGAGCACCTGCTTCTTCCTGTGCCTGCTGAGGTTCTGCTTCTCTGCCACCAGGAG |
| | ATACTACCTGGGGGCTGTGGAGCTGAGCTGGGACTACATGCAGTCTGACCTGGGGGAGCTGCCTGTGGATGCCAGGTTCCCCCCCAGAGTGCCCAAGA |
| | GCTTCCCCTTCAACACCTCTGTGGTGTACAAGAAGACCCTGTTTGTGGAGTTCACTGACCACCTGTTCAACATTGCCAAGCCCAGGCCCCCCTGGATG |
| | GGCCTGCTGGGCCCCACCATCCAGGCTGAGGTGTATGACACTGTGGTGATCACCCTGAAGAACATGGCCAGCCACCCTGTGAGCCTGCATGCTGTGGG |
| | GGTGAGCTACTGGAAGGCCTCTGAGGGGGCTGAGTATGATGACCAGACCAGCCAGAGGGAGAAGGAGGATGACAAGGTGTTCCCTGGGGGCAGCCACA |
| | CCTATGTGTGGCAGGTGCTGAAGGAGAATGGCCCCATGGCCTCTGACCCCCTGTGCCTGACCTACAGCTACCTGAGCCATGTGGACCTGGTGAAGGAC |
| | CTGAACTCTGGCCTGATTGGGGCCCTGCTGGTGTGCAGGGAGGGCAGCCTGGCCAAGGAGAAGACCCAGACCCTGCACAAGTTCATCCTGCTGTTTGC |
| | TGTGTTTGATGAGGGCAAGAGCTGGCACTCTGAAACCAAGAACAGCCTGATGCAGGACAGGGATGCTGCCTCTGCCAGGGCCTGGCCCAAGATGCACA |
| | CTGTGAATGGCTATGTGAACAGGAGCCTGCCTGGCCTGATTGGCTGCCACAGGAAGTCTGTGTACTGGCATGTGATTGGCATGGGCACCACCCCTGAG |
| | GTGCACAGCATCTTCCTGGAGGGCCACACCTTCCTGGTCAGGAACCACAGGCAGGCCAGCCTGGAGATCAGCCCCATCACCTTCCTGACTGCCCAGAC |
| | CCTGCTGATGGACCTGGGCCAGTTCCTGCTGTTCTGCCACATCAGCAGCCACCAGCATGATGGCATGGAGGCCTATGTGAAGGTGGACAGCTGCCCTG |
| | AGGAGCCCCAGCTGAGGATGAAGAACAATGAGGAGGCTGAGGACTATGATGATGACCTGACTGACTCTGAGATGGATGTGGTGAGGTTTGATGATGAC |
| | AACAGCCCCAGCTTCATCCAGATCAGGTCTGTGGCCAAGAAGCACCCCAAGACCTGGGTGCACTACATTGCTGCTGAGGAGGAGGACTGGGACTATGC |
| | CCCCCTGGTGCTGGCCCCTGATGACAGGAGCTACAAGAGCCAGTACCTGAACAATGGCCCCCAGAGGATTGGCAGGAAGTACAAGAAGGTCAGGTTCA |
| | TGGCCTACACTGATGAAACCTTCAAGACCAGGGAGGCCATCCAGCATGAGTCTGGCATCCTGGGCCCCCTGCTGTATGGGGAGGTGGGGGACACCCTG |
| | CTGATCATCTTCAAGAACCAGGCCAGCAGGCCCTACAACATCTACCCCCATGGCATCACTGATGTGAGGCCCCTGTACAGCAGGAGGCTGCCCAAGGG |
| | GGTGAAGCACCTGAAGGACTTCCCCATCCTGCCTGGGGAGATCTTCAAGTACAAGTGGACTGTGACTGTGGAGGATGGCCCCACCAAGTCTGACCCCA |
| | GGTGCCTGACCAGATACTACAGCAGCTTTGTGAACATGGAGAGGGACCTGGCCTCTGGCCTGATTGGCCCCCTGCTGATCTGCTACAAGGAGTCTGTG |
| | GACCAGAGGGGCAACCAGATCATGTCTGACAAGAGGAATGTGATCCTGTTCTCTGTGTTTGATGAGAACAGGAGCTGGTACCTGACTGAGAACATCCA |
| | GAGGTTCCTGCCCAACCCTGCTGGGGTGCAGCTGGAGGACCCTGAGTTCCAGGCCAGCAACATCATGCACAGCATCAATGGCTATGTGTTTGACAGCC |
| | TGCAGCTGTCTGTGTGCCTGCATGAGGTGGCCTACTGGTACATCCTGAGCATTGGGGCCCAGACTGACTTCCTGTCTGTGTTCTTCTCTGGCTACACC |
| | TTCAAGCACAAGATGGTGTATGAGGACACCCTGACCCTGTTCCCCTTCTCTGGGGAGACTGTGTTCATGAGCATGGAGAACCCTGGCCTGTGGATTCT |
| | GGGCTGCCACAACTCTGACTTCAGGAACAGGGGCATGACTGCCCTGCTGAAAGTCTCCAGCTGTGACAAGAACACTGGGGACTACTATGAGGACAGCT |
| | ATGAGGACATCTCTGCCTACCTGCTGAGCAAGAACAATGCCATTGAGCCCAGGAGCTTCAGCCAGAATGCCACTAATGTGTCTAACAACAGCAACACC |
| | AGCAATGACAGCAATGTGTCTCCCCCAGTGCTGAAGAGGCACCAGAGGGAGATCACCAGGACCACCCTGCAGTCTGACCAGGAGGAGATTGACTATGA |
| | TGACACCATCTCTGTGGAGATGAAGAAGGAGGACTTTGACATCTACGACGAGGACGAGAACCAGAGCCCCAGGAGCTTCCAGAAGAAGACCAGGCACT |
| | ACTTCATTGCTGCTGTGGAGAGGCTGTGGGACTATGGCATGAGCAGCAGCCCCCATGTGCTGAGGAACAGGGCCCAGTCTGGCTCTGTGCCCCAGTTC |
| | AAGAAGGTGGTGTTCCAGGAGTTCACTGATGGCAGCTTCACCCAGCCCCTGTACAGAGGGGAGCTGAATGAGCACCTGGGCCTGCTGGGCCCCTACAT |
| | CAGGGCTGAGGTGGAGGACAACATCATGGTGACCTTCAGGAACCAGGCCAGCAGGCCCTACAGCTTCTACAGCAGCCTGATCAGCTATGAGGAGGACC |
| | AGAGGCAGGGGGCTGAGCCCAGGAAGAACTTTGTGAAGCCCAATGAAACCAAGACCTACTTCTGGAAGGTGCAGCACCACATGGCCCCCACCAAGGAT |
| | GAGTTTGACTGCAAGGCCTGGGCCTACTTCTCTGATGTGGACCTGGAGAAGGATGTGCACTCTGGCCTGATTGGCCCCCTGCTGGTGTGCCACACCAA |
| | CACCCTGAACCCTGCCCATGGCAGGCAGGTGACTGTGCAGGAGTTTGCCCTGTTCTTCACCATCTTTGATGAAACCAAGAGCTGGTACTTCACTGAGA |
| | ACATGGAGAGGAACTGCAGGGCCCCCTGCAACATCCAGATGGAGGACCCCACCTTCAAGGAGAACTACAGGTTCCATGCCATCAATGGCTACATCATG |
| | GACACCCTGCCTGGCCTGGTGATGGCCCAGGACCAGAGGATCAGGTGGTACCTGCTGAGCATGGGCAGCAATGAGAACATCCACAGCATCCACTTCTC |
| | TGGCCATGTGTTCACTGTGAGGAAGAAGGAGGAGTACAAGATGGCCCTGTACAACCTGTACCCTGGGGTGTTTGAGACTGTGGAGATGCTGCCCAGCA |
| | AGGCTGGCATCTGGAGGGTGGAGTGCCTGATTGGGGAGCACCTGCATGCTGGCATGAGCACCCTGTTCCTGGTGTACAGCAACAAGTGCCAGACCCCC |
| | CTGGGCATGGCCTCTGGCCACATCAGGGACTTCCAGATCACTGCCTCTGGCCAGTATGGCCAGTGGGCCCCCAAGCTGGCCAGGCTGCACTACTCTGG |
| | CAGCATCAATGCCTGGAGCACCAAGGAGCCCTTCAGCTGGATCAAGGTGGACCTGCTGGCCCCCATGATCATCCATGGCATCAAGACCCAGGGGGCCA |
| | GGCAGAAGTTCAGCAGCCTGTACATCAGCCAGTTCATCATCATGTACAGCCTGGATGGCAAGAAGTGGCAGACCTACAGGGGCAACAGCACTGGCACC |
| | CTGATGGTGTTCTTTGGCAATGTGGACAGCTCTGGCATCAAGCACAACATCTTCAACCCCCCCATCATTGCCAGATACATCAGGCTGCACCCCACCCA |
| | CTACAGCATCAGGAGCACCCTGAGGATGGAGCTGATGGGCTGTGACCTGAACAGCTGCAGCATGCCCCTGGGCATGGAGAGCAAGGCCATCTCTGATG |
| | CCCAGATCACTGCCAGCAGCTACTTCACCAACATGTTTGCCACCTGGAGCCCCAGCAAGGCCAGGCTGCACCTGCAGGGCAGGAGCAATGCCTGGAGG |
| | CCCCAGGTCAACAACCCCAAGGAGTGGCTGCAGGTGGACTTCCAGAAGACCATGAAGGTGACTGGGGTGACCACCCAGGGGGTGAAGAGCCTGCTGAC |
| | CAGCATGTATGTGAAGGAGTTCCTGATCAGCAGCAGCCAGGATGGCCACCAGTGGACCCTGTTCTTCCAGAATGGCAAGGTGAAGGTGTTCCAGGGCA |
| | ACCAGGACAGCTTCACCCCTGTGGTGAACAGCCTGGACCCCCCCCTGCTGACCAGATACCTGAGGATTCACCCCCAGAGCTGGGTGCACCAGATTGCC |
| | CTGAGGATGGAGGTGCTGGGCTGTGAGGCCCAGGACCTGTACTGATTAATTAAGAGCATCTTACCGCCATTTATTCCCATATTTGTTCTGTTTTTCTT |
| | GATTTGGGTATACATTTAAATGTTAATAAAACAAAATGGTGGGGCAATCATTTACATTTTTAGGGATATGTAATTACTAGTTCAGGTGTATTGCCACA |
| | AGACAAACATGTTAAGAAACTTTCCCGTTATTTACGCTCTGTTCCTGTTAATCAACCTCTGGATTACAAAATTTGTGAAAGATTGACTGATATTCTTA |
| | ACTATGTTGCTCCTTTTACGCTGTGTGGATATGCTGCTTTATAGCCTCTGTATCTAGCTATTGCTTCCCGTACGGCTTTCGTTTTCTCCTCCTTGTAT |
| | AAATCCTGGTTGCTGTCTCTTTTAGAGGAGTTGTGGCCCGTTGTCCGTCAACGTGGCGTGGTGTGCTCTGTGTTTGCTGACGCAACCCCCACTGGCTG |
| | GGGCATTGCCACCACCTGTCAACTCCTTTCTGGGACTTTCGCTTTCCCCCTCCCGATCGCCACGGCAGAACTCATCGCCGCCTGCCTTGCCCGCTGCT |
| | GGACAGGGGCTAGGTTGCTGGGCACTGATAATTCCGTGGTGTTGTCTCCATAAAGTAGGAAACACTACACGATTCCATAAAGTAGGAAACACTACATC |
| | ACTCCATAAAGTAGGAAACACTACATGTGCCTTCTAGTTGCCAGCCATCTGTTGTTTGCCCCTCCCCCGTGCCTTCCTTGACCCTGGAAGGTGCCACT |
| | CCCACTGTCCTTTCCTAATAAAATGAGGAAATTGCATCGCATTGTCTGAGTAGGTGTCATTCTATTCTGGGGGGTGGGGTGGGGCAGGACAGCAAGGG |
| | GGAGGATTGGGAAGACAATAGCAGGCATGCTGGGGATGCGGTGGGCTCTATGGCTCTAGAGCATGGCTACGTAGATAAGTAGCATGGCGGGTTAATCA |
| | TTAACTACACCTGCAGGAGGAACCCCTAGTGATGGAGTTGGCCACTCCCTCTCTGCGCGCTCGCTCGCTCACTGAGGCCGGGCGACCAAAGGTCGCCC |
| | GACGCCCGGGCGGCCTCAGTGAGCGAGCGAGCGCGCAGCTGCCTGCAGGGGCGCGCCTCGAGGCATGCGGTACCAAGCTTGTCGAGAAGTACTAGAGG |
| | ATCATAATCAGCCATACCACATTTGTAGAGGTTTTACTTGCTTTAAAAAACCTCCCACACCTCCCCCTGAACCTGAAACATAAAATGAATGCAATTGT |
| | TGTTGTTAACTTGTTTATTGCAGCTTATAATGGTTACAAATAAAGCAATAGCATCACAAATTTCACAAATAAAGCATTTTTTTCACTGCATTCTAGTT |
| | GTGGTTTGTCCAAACTCATCAATGTATCTTATCATGTCTGGATCTGATCACTGATATCGCCTAGGAGATCCGAACCAGATAAGTGAAATCTAGTTCCA |
| | AACTATTTTGTCATTTTTAATTTTCGTATTAGCTTACGACGCTACACCCAGTTCCCATCTATTTTGTCACTCTTCCCTAAATAATCCTTAAAAACTCC |
| | ATTTCCACCCCTCCCAGTTCCCAACTATTTTGTCCGCCCACAGCGGGGCATTTTTCTTCCTGTTATGTTTTTAATCAAACATCCTGCCAACTCCATGT |
| | GACAAACCGTCATCTTCGGCTACTTTTTCTCTGTCACAGAATGAAAATTTTTCTGTCATCTCTTCGTTATTAATGTTTGTAATTGACTGAATATCAAC |
| | GCTTATTTGCAGCCTGAATGGCGAATGGGACGCGCCCTGTAGCGGCGCATTAAGCGCGGCGGGTGTGGTGGTTACGCGCAGCGTGACCGCTACACTTG |
| | CCAGCGCCCTAGCGCCCGCTCCTTTCGCTTTCTTCCCTTCCTTTCTCGCCACGTTCGCCGGCTTTCCCCGTCAAGCTCTAAATCGGGGGCTCCCTTTA |
| | GGGTTCCGATTTAGTGCTTTACGGCACCTCGACCCCAAAAAACTTGATTAGGGTGATGGTTCACGTAGTGGGCCATCGCCCTGATAGACGGTTTTTCG |
| | CCCTTTGACGTTGGAGTCCACGTTCTTTAATAGTGGACTCTTGTTCCAAACTGGAACAACACTCAACCCTATCTCGGTCTATTCTTTTGATTTATAAG |
| | GGATTTTGCCGATTTCGGCCTATTGGTTAAAAAATGAGCTGATTTAACAAAAATTTAACGCGAATTTTAACAAAATATTAACGTTTACAATTTCAGGT |
| | GGCACTTTTCGGGGAAATGTGCGCGGAACCCCTATTTGTTTATTTTTCTAAATACATTCAAATATGTATCCGCTCATGAGACAATAACCCTGATAAAT |
| | GCTTCAATAATATTGAAAAAGGAAGAGTATGAGTATTCAACATTTCCGTGTCGCCCTTATTCCCTTTTTTGCGGCATTTTGCCTTCCTGTTTTTGCTC |
| | ACCCAGAAACGCTGGTGAAAGTAAAAGATGCTGAAGATCAGTTGGGTGCACGAGTGGGTTACATCGAACTGGATCTCAACAGCGGTAAGATCCTTGAG |
| | AGTTTTCGCCCCGAAGAACGTTTTCCAATGATGAGCACTTTTAAAGTTCTGCTATGTGGCGCGGTATTATCCCGTATTGACGCCGGGCAAGAGCAACT |
| | CGGTCGCCGCATACACTATTCTCAGAATGACTTGGTTGAGTACTCACCAGTCACAGAAAAGCATCTTACGGATGGCATGACAGTAAGAGAATTATGCA |
| | GTGCTGCCATAACCATGAGTGATAACACTGCGGCCAACTTACTTCTGACAACGATCGGAGGACCGAAGGAGCTAACCGCTTTTTTGCACAACATGGGG |
| | GATCATGTAACTCGCCTTGATCGTTGGGAACCGGAGCTGAATGAAGCCATACCAAACGACGAGCGTGACACCACGATGCCTGTAGCAATGGCAACAAC |
| | GTTGCGCAAACTATTAACTGGCGAACTACTTACTCTAGCTTCCCGGCAACAATTAATAGACTGGATGGAGGCGGATAAAGTTGCAGGACCACTTCTGC |
| | GCTCGGCCCTTCCGGCTGGCTGGTTTATTGCTGATAAATCTGGAGCCGGTGAGCGTGGGTCTCGCGGTATCATTGCAGCACTGGGGCCAGATGGTAAG |
| | CCCTCCCGTATCGTAGTTATCTACACGACGGGGAGTCAGGCAACTATGGATGAACGAAATAGACAGATCGCTGAGATAGGTGCCTCACTGATTAAGCA |
| | TTGGTAACTGTCAGACCAAGTTTACTCATATATACTTTAGATTGATTTAAAACTTCATTTTTAATTTAAAAGGATCTAGGTGAAGATCCTTTTTGATA |
| | ATCTCATGACCAAAATCCCTTAACGTGAGTTTTCGTTCCACTGAGCGTCAGACCCCGTAGAAAAGATCAAAGGATCTTCTTGAGATCCTTTTTTTCTG |
| | CGCGTAATCTGCTGCTTGCAAACAAAAAAACCACCGCTACCAGCGGTGGTTTGTTTGCCGGATCAAGAGCTACCAACTCTTTTTCCGAAGGTAACTGG |
| | CTTCAGCAGAGCGCAGATACCAAATACTGTCCTTCTAGTGTAGCCGTAGTTAGGCCACCACTTCAAGAACTCTGTAGCACCGCCTACATACCTCGCTC |
| | TGCTAATCCTGTTACCAGTGGCTGCTGCCAGTGGCGATAAGTCGTGTCTTACCGGGTTGGACTCAAGACGATAGTTACCGGATAAGGCGCAGCGGTCG |
| | GGCTGAACGGGGGGTTCGTGCACACAGCCCAGCTTGGAGCGAACGACCTACACCGAACTGAGATACCTACAGCGTGAGCATTGAGAAAGCGCCACGCT |
| | TCCCGAAGGGAGAAAGGCGGACAGGTATCCGGTAAGCGGCAGGGTCGGAACAGGAGAGCGCACGAGGGAGCTTCCAGGGGGAAACGCCTGGTATCTTT |
| | ATAGTCCTGTCGGGTTTCGCCACCTCTGACTTGAGCGTCGATTTTTGTGATGCTCGTCAGGGGGGCGGAGCCTATGGAAAAACGCCAGCAACGCGGCC |
| | TTTTTACGGTTCCTGGCCTTTTGCTGGCCTTTTGCTCACATGTTCTTTCCTGCGTTATCCCCTGATTCTGTGGATAACCGTATTACCGCCTTTGAGTG |
| | AGCTGATACCGCTCGCCGCAGCCGAACGACCGAGCGCAGCGAGTCAGTGAGCGAGGAAGCGGAAGAGCGCCTGATGCGGTATTTTCTCCTTACGCATC |
| | TGTGCGGTATTTCACACCGCAGACCAGCCGCGTAACCTGGCAAAATCGGTTACGGTTGAGTAATAAATGGATGCCCTGCGTAAGCGGGTGTGGGCGGA |
| | CAATAAAGTCTTAAACTGAACAAAATAGATCTAAACTATGACAATAAAGTCTTAAACTAGACAGAATAGTTGTAAACTGAAATCAGTCCAGTTATGCT |
| | GTGAAAAAGCATACTGGACTTTTGTTATGGCTAAAGCAAACTCTTCATTTTCTGAAGTGCAAATTGCCCGTCGTATTAAAGAGGGGCGTGGCCAAGGG |
| | CATGGTAAAGACTATATTCGCGGCGTTGTGACAATTTACCGAACAACTCCGCGGCCGGGAAGCCGATCTCGGCTTGAACGAATTGTTAGGTGGCGGTA |
| | CTTGGGTCGATATCAAAGTGCATCACTTCTTCCCGTATGCCCAACTTTGTATAGAGAGCCACTGCGGGATCGTCACCGTAATCTGCTTGCACGTAGAT |
| | CACATAAGCACCAAGCGCGTTGGCCTCATGCTTGAGGAGATTGATGAGCGCGGTGGCAATGCCCTGCCTCCGGTGCTCGCCGGAGACTGCGAGATCAT |
| | AGATATAGATCTCACTACGCGGCTGCTCAAACCTGGGCAGAACGTAAGCCGCGAGAGCGCCAACAACCGCTTCTTGGTCGAAGGCAGCAAGCGCGATG |
| | AATGTCTTACTACGGAGCAAGTTCCCGAGGTAATCGGAGTCCGGCTGATGTTGGGAGTAGGTGGCTACGTCTCCGAACTCACGACCGAAAAGATCAAG |
| | AGCAGCCCGCATGGATTTGACTTGGTCAGGGCCGAGCCTACATGTGCGAATGATGCCCATACTTGAGCCACCTAACTTTGTTTTAGGGCGACTGCCCT |
| | GCTGCGTAACATCGTTGCTGCTGCGTAACATCGTTGCTGCTCCATAACATCAAACATCGACCCACGGCGTAACGCGCTTGCTGCTTGGATGCCCGAGG |
| | CATAGACTGTACAAAAAAACAGTCATAACAAGCCATGAAAACCGCCACTGCGCCGTTACCACCGCTGCGTTCGGTCAAGGTTCTGGACCAGTTGCGTG |
| | AGCGCATACGCTACTTGCATTACAGTTTACGAACCGAACAGGCTTATGTCAACTGGGTTCGTGCCTTCATCCGTTTCCACGGTGTGCGTCACCCGGCA |
| | ACCTTGGGCAGCAGCGAAGTCGAGGCATTTCTGTCCTGGCTGGCGAACGAGCGCAAGGTTTCGGTCTCCACGCATCGTCAGGCATTGGCGGCCTTGCT |
| | GTTCTTCTACGGCAAGGTGCTGTGCACGGATCTGCCCTGGCTTCAGGAGATCGGAAGACCTCGGCCGTCGCGGCGCTTGCCGGTGGTGCTGACCCCGG |
| | ATGAAGTGGTTCGCATCCTCGGTTTTCTGGAAGGCGAGCATCGTTTGTTCGCCCAGGACTCTAGCTATAGTTCTAGTGGTTGGCTACGTATACTCCGG |
| | AATATTAATAGATCATGGAGATAATTAAAATGATAACCATCTCGCAAATAAATAAGTATTTTACTGTTTTCGTAACAGTTTTGTAATAAAAAAACCTA |
| | TAAATATTCCGGATTATTCATACCGTCCCACCATCGGGCGCGGATCTCGGTCCGAAACCATGTCGTACTACCATCACCATCACCATCACGATTACGAT |
| | ATCCCAACGACCGAAAACCTGTATTTTCAGGGCGCCATGGGATCC |
| ceDNAFVIII- | GGCCGGCCCCTGCAGGCAGCTGCGCGCTCGCTCGCTCACTGAGGCCGCCCGGGCAAAGCCCGGGCGTCGGGCGACCTTTGGTCGCCCGGCCTCAGTGA |
| vector 21 | GCGAGCGAGCGCGCAGAGAGGGAGTGGCCAACTCCATCACTAGGGGTTCCTTGTAGTTAATGATTAACCCGCCATGCTACTTATCTACGTAGCCATGC |
| (SEQ ID NO: | TCTAGAGCGGCCGCTCAATATTGGCCATTAGCCATATTATTCATTGGTTATATAGCATAAATCAATATTGGCTATTGGCCATTGCATACGTTGTATCT |
| 212) | ATATCATAATATGTACATTTATATTGGCTCATGTCCAATATGACCGCCATGTTGGCATTGATTATTGACTAGTTATTAATAGTAATCAATTACGGGGT |
| | CATTAGTTCATAGCCCATATATGGAGTTCCGCGTTACATAACTTACGGTAAATGGCCCGCCTGGCTGACCGCCCAACGACCCCCGCCCATTGACGTCA |
| | ATAATGACGTATGTTCCCATAGTAACGCCAATAGGGACTTTCCATTGACGTCAATGGGTGGAGTATTTACGGTAAACTGCCCACTTGGCAGTACATCA |
| | AGTGTATCATATGCCAAGTCCGCCCCCTATTGACGTCAATGACGGTAAATGGCCCGCCTGGCATTATGCCCAGTACATGACCTTACGGGACTTTCCTA |
| | CTTGGCAGTACATCTACGTATTAGTCATCGCTATTACCATGGTCGAGGTGAGCCCCACGTTCTGCTTCACTCTCCCCATCTCCCCCCCCTCCCCACCC |
| | CCAATTTTGTATTTATTTATTTTTTAATTATTTTGTGCAGCGATGGGGGCGGGGGGGGGGGGGGGGCGCGCGCCAGGCGGGGCGGGGCGGGGCGAGGG |
| | GCGGGGCGGGGCGAGGCGGAGAGGTGCGGCGGCAGCCAATCAGAGCGGCGCGCTCCGAAAGTTTCCTTTTATGGCGAGGCGGCGGCGGCGGCGGCCCT |
| | ATAAAAAGCGAAGCGCGCGGCGGGCGGGAGTCGCTGCGACGCTGCCTTCGCCCCGTGCCCCGCTCCGCCGCCGCCTCGCGCCGCCCGCCCCGGCTCTG |
| | ACTGACCGCGTTACTCCCACAGGTGAGCGGGCGGGACGGCCCTTCTCCTCCGGGCTGTAATTAGCGCTTGGTTTAATGACGGCTTGTTTCTTTTCTGT |
| | GGCTGCGTGAAAGCCTTGAGGGGCTCCGGGAGGGCCCTTTGTGCGGGGGGGAGCGGCTCGGGGGGTGCGTGCGTGTGTGTGTGCGTGGGGAGCGCCGC |
| | GTGCGGCCCGCGCTGCCCGGCGGCTGTGAGCGCTGCGGGCGCGGCGCGGGGCTTTGTGCGCTCCGCAGTGTGCGCGAGGGGAGCGCGGCCGGGGGCGG |
| | TGCCCCGCGGTGCGGGGGGGGCTGCGAGGGGAACAAAGGCTGCGTGCGGGGTGTGTGCGTGGGGGGGTGAGCAGGGGGTGTGGGCGCGGCGGTCGGGC |
| | TGTAACCCCCCCCTGCACCCCCCTCCCCGAGTTGCTGAGCACGGCCCGGCTTCGGGTGCGGGGCTCCGTACGGGGCGTGGCGCGGGGCTCGCCGTGCC |
| | GGGCGGGGGGTGGCGGCAGGTGGGGGTGCCGGGCGGGGCGGGGCCGCCTCGGGCCGGGGAGGGCTCGGGGGAGGGGCGCGGCGGCCCCCGGAGCGCCG |
| | GCGGCTGTCGAGGCGCGGCGAGCCGCAGCCATTGCCTTTTATGGTAATCGTGCGAGAGGGCGCAGGGACTTCCTTTGTCCCAAATCTGTGCGGAGCCG |
| | AAATCTGGGAGGCGCCGCCGCACCCCCTCTAGCGGGCGCGGGGCGAAGCGGTGCGGCGCCGGCAGGAAGGAAATGGGCGGGGAGGGCCTTCGTGCGTC |
| | GCCGCGCCGCCGTCCCCTTCTCCCTCTCCAGCCTCGGGGCTGTCCGCGGGGGGACGGCTGCCTTCGGGGGGGACGGGGCAGGGCGGGGTTCGGCTTCT |
| | GGCGTGTGACCGGCGGCTCTAGAGCCTCTGCTAACCATGTTTTAGCCTTCTTCTTTTTCCTACAGCTCCTGGGCAACGTGCTGGTTATTGTGCTGTCT |
| | CATCATTTGTCGACAGAATTCCTCGAAGATCCGAAGGGGTTCAAGCTTGGCATTCCGGTACTGTTGGTAAAGCCAGTTTAAACGCCGCCACCATGCAG |
| | ATCGAGCTGTCTACCTGCTTCTTCCTGTGCCTGCTGCGGTTCTGCTTCAGCGCCACCAGAAGATATTACCTGGGCGCCGTGGAACTGAGCTGGGACTA |
| | CATGCAGTCTGACCTGGGAGAGCTGCCCGTGGACGCTAGATTTCCTCCAAGAGTGCCCAAGAGCTTCCCCTTCAACACCTCCGTGGTGTACAAGAAAA |
| | CCCTGTTCGTGGAATTCACCGACCACCTGTTCAATATCGCCAAGCCTCGGCCTCCTTGGATGGGACTGCTGGGACCTACAATTCAGGCCGAGGTGTAC |
| | GACACCGTGGTCATCACCCTGAAGAACATGGCCAGCCATCCTGTGTCTCTGCACGCCGTGGGAGTGTCTTATTGGAAGGCTTCTGAGGGCGCCGAGTA |
| | CGACGATCAGACAAGCCAGAGAGAGAAAGAGGACGACAAGGTTTTCCCTGGCGGCAGCCACACCTATGTCTGGCAGGTCCTGAAAGAAAACGGCCCTA |
| | TGGCCTCCGATCCTCTGTGCCTGACATACAGCTACCTGAGCCACGTGGACCTGGTCAAGGACCTGAATTCTGGCCTGATCGGAGCCCTGCTCGTGTGT |
| | AGAGAAGGCAGCCTGGCCAAAGAGAAAACCCAGACACTGCACAAGTTCATCCTGCTGTTCGCCGTGTTCGACGAGGGCAAGAGCTGGCACAGCGAGAC |
| | AAAGAACAGCCTGATGCAGGACAGGGATGCCGCCTCTGCTAGAGCTTGGCCTAAGATGCACACCGTGAACGGCTACGTGAACAGAAGCCTGCCTGGAC |
| | TGATCGGCTGCCACAGAAAGTCCGTGTACTGGCACGTGATCGGCATGGGCACAACACCTGAGGTGCACAGCATCTTTCTGGAAGGCCACACCTTCCTC |
| | GTGCGGAACCACAGACAGGCCAGCCTGGAAATCAGCCCTATCACCTTCCTGACCGCTCAGACCCTGCTGATGGATCTGGGCCAGTTTCTGCTGTTCTG |
| | CCACATCAGCTCCCACCAGCACGATGGCATGGAAGCCTACGTGAAGGTGGACAGCTGCCCCGAAGAACCCCAGCTGCGGATGAAGAACAACGAGGAAG |
| | CCGAGGACTACGACGACGACCTGACCGACTCTGAGATGGACGTCGTCAGATTCGACGACGATAACAGCCCCAGCTTCATCCAGATCAGAAGCGTGGCC |
| | AAGAAGCACCCCAAGACCTGGGTGCACTATATCGCCGCCGAGGAAGAGGACTGGGATTACGCTCCTCTGGTGCTGGCCCCTGACGACAGAAGCTACAA |
| | GAGCCAGTACCTGAACAACGGCCCTCAGCGGATCGGCCGGAAGTATAAGAAAGTGCGGTTCATGGCCTACACCGACGAGACATTCAAGACCAGAGAGG |
| | CCATCCAGCACGAGAGCGGAATTCTGGGCCCTCTGCTGTATGGCGAAGTGGGCGATACACTGCTGATCATCTTCAAGAACCAGGCCAGCAGACCCTAC |
| | AACATCTACCCTCACGGCATCACCGATGTGCGGCCCCTGTATTCTAGAAGGCTGCCCAAGGGCGTGAAGCACCTGAAGGACTTCCCTATCCTGCCTGG |
| | CGAGATTTTCAAGTACAAGTGGACCGTGACCGTGGAAGATGGCCCCACCAAGAGCGACCCTAGATGTCTGACACGGTACTACAGCAGCTTCGTGAACA |
| | TGGAACGCGACCTGGCCAGCGGCCTGATTGGACCTCTGCTGATCTGCTACAAAGAAAGCGTGGACCAGCGGGGCAACCAGATCATGAGCGACAAGCGG |
| | AACGTGATCCTGTTTAGCGTGTTCGATGAGAACCGGTCCTGGTATCTGACCGAGAACATCCAGCGGTTTCTGCCCAATCCTGCCGGGGTGCAACTGGA |
| | AGATCCTGAGTTCCAGGCAAGCAACATCATGCACTCCATCAATGGCTATGTGTTCGACAGCCTGCAGCTGAGCGTGTGCCTGCACGAAGTGGCCTACT |
| | GGTACATCCTGAGCATTGGCGCCCAGACCGACTTCCTGTCCGTGTTCTTTAGCGGCTACACCTTCAAGCACAAGATGGTGTACGAGGATACCCTGACA |
| | CTGTTCCCATTCAGCGGCGAGACAGTGTTCATGAGCATGGAAAACCCCGGCCTGTGGATTCTGGGCTGTCACAACAGCGACTTCCGGAACAGAGGCAT |
| | GACAGCCCTGCTGAAGGTGTCCAGCTGCGACAAGAACACCGGCGACTACTACGAGGACAGCTATGAGGACATCAGCGCCTACCTGCTGAGCAAGAACA |
| | ATGCCATCGAGCCTCGGAGCTTCAGCCAGAATCCTCCTGTGCTGAAGCGGCACCAGCGCGAGATCACCAGAACAACCCTGCAGAGCGACCAAGAGGAA |
| | ATCGATTACGACGACACCATCAGCGTCGAGATGAAGAAAGAAGATTTCGACATCTACGACGAGGACGAGAATCAGAGCCCCAGAAGCTTTCAGAAAAA |
| | GACCCGGCACTACTTCATTGCCGCCGTCGAGAGACTGTGGGACTACGGCATGTCTAGCAGCCCTCACGTGCTGAGAAATAGAGCCCAGAGCGGCAGCG |
| | TGCCCCAGTTCAAGAAAGTGGTGTTCCAAGAGTTCACCGACGGCAGCTTCACCCAGCCACTGTATAGAGGCGAGCTGAACGAGCATCTGGGCCTGCTG |
| | GGCCCTTATATCAGAGCCGAAGTGGAAGATAACATCATGGTCACCTTCCGGAATCAGGCTAGCCGGCCTTACAGCTTCTACAGCTCCCTGATCAGCTA |
| | CGAAGAGGACCAGAGACAGGGCGCTGAGCCCAGAAAGAACTTCGTGAAGCCCAACGAGACTAAGACCTACTTTTGGAAGGTGCAGCACCACATGGCCC |
| | CTACAAAGGACGAGTTCGACTGCAAAGCCTGGGCCTACTTCTCCGATGTGGATCTGGAAAAGGACGTGCACAGCGGGCTCATCGGACCACTGCTTGTG |
| | TGCCACACCAACACACTGAACCCCGCTCACGGCAGACAAGTGACAGTGCAAGAGTTCGCCCTGTTCTTCACCATCTTCGACGAAACAAAGAGCTGGTA |
| | CTTCACCGAGAATATGGAACGGAACTGCAGAGCCCCTTGCAACATCCAGATGGAAGATCCCACCTTCAAAGAGAACTACCGGTTCCACGCCATCAACG |
| | GCTACATCATGGACACACTGCCCGGCCTGGTTATGGCCCAGGATCAGAGAATCCGGTGGTATCTGCTGTCCATGGGCTCCAACGAGAATATCCACAGC |
| | ATCCACTTCAGCGGCCACGTGTTCACCGTGCGGAAAAAAGAAGAGTACAAAATGGCCCTGTACAATCTGTACCCTGGGGTGTTCGAAACCGTGGAAAT |
| | GCTGCCTTCCAAGGCCGGCATTTGGAGAGTGGAATGTCTGATTGGAGAGCACCTCCACGCCGGAATGAGCACCCTGTTTCTGGTGTACAGCAACAAGT |
| | GTCAGACCCCTCTCGGCATGGCCTCTGGACACATCAGAGACTTCCAGATCACCGCCTCTGGCCAGTACGGACAGTGGGCTCCTAAACTGGCTCGGCTG |
| | CACTACAGCGGCAGCATCAATGCCTGGTCCACCAAAGAGCCCTTCAGCTGGATCAAGGTGGACCTGCTGGCTCCCATGATCATCCACGGAATCAAGAC |
| | CCAGGGCGCCAGACAGAAGTTCAGCAGCCTGTACATCAGCCAGTTCATCATCATGTACAGCCTGGACGGCAAGAAGTGGCAGACCTACAGAGGCAACA |
| | GCACCGGCACACTCATGGTGTTCTTCGGCAACGTGGACTCCAGCGGCATTAAGCACAACATCTTCAACCCTCCAATCATTGCCCGGTACATCCGGCTG |
| | CACCCCACACACTACAGCATCCGGTCTACCCTGAGAATGGAACTGATGGGCTGCGACCTGAACAGCTGCTCTATGCCCCTCGGAATGGAAAGCAAGGC |
| | CATCAGCGACGCCCAGATCACAGCCAGCAGCTACTTCACCAACATGTTCGCCACTTGGAGCCCCTCCAAGGCTAGACTGCATCTGCAGGGCAGAAGCA |
| | ACGCTTGGAGGCCCCAAGTGAACAACCCCAAAGAGTGGCTGCAGGTTGACTTTCAAAAGACCATGAAAGTGACCGGCGTGACCACACAGGGCGTCAAG |
| | TCTCTGCTGACCTCTATGTACGTGAAAGAGTTCCTGATCTCCAGCAGCCAGGACGGCCATCAGTGGACCCTGTTTTTCCAGAACGGCAAAGTGAAAGT |
| | GTTCCAGGGCAATCAGGACAGCTTCACACCCGTGGTCAATTCTCTGGACCCTCCACTGCTGACCAGATACCTGCGGATTCACCCTCAGTCTTGGGTGC |
| | ACCAGATCGCTCTGCGGATGGAAGTGCTGGGCTGTGAAGCTCAGGACCTCTACTAGTTAATTAAGAGCATCTTACCGCCATTTATTCCCATATTTGTT |
| | CTGTTTTTCTTGATTTGGGTATACATTTAAATGTTAATAAAACAAAATGGTGGGGCAATCATTTACATTTTTAGGGATATGTAATTACTAGTTCAGGT |
| | GTATTGCCACAAGACAAACATGTTAAGAAACTTTCCCGTTATTTACGCTCTGTTCCTGTTAATCAACCTCTGGATTACAAAATTTGTGAAAGATTGAC |
| | TGATATTCTTAACTATGTTGCTCCTTTTACGCTGTGTGGATATGCTGCTTTATAGCCTCTGTATCTAGCTATTGCTTCCCGTACGGCTTTCGTTTTCT |
| | CCTCCTTGTATAAATCCTGGTTGCTGTCTCTTTTAGAGGAGTTGTGGCCCGTTGTCCGTCAACGTGGCGTGGTGTGCTCTGTGTTTGCTGACGCAACC |
| | CCCACTGGCTGGGGCATTGCCACCACCTGTCAACTCCTTTCTGGGACTTTCGCTTTCCCCCTCCCGATCGCCACGGCAGAACTCATCGCCGCCTGCCT |
| | TGCCCGCTGCTGGACAGGGGCTAGGTTGCTGGGCACTGATAATTCCGTGGTGTTGTCTCCATAAAGTAGGAAACACTACACGATTCCATAAAGTAGGA |
| | AACACTACATCACTCCATAAAGTAGGAAACACTACATGTGCCTTCTAGTTGCCAGCCATCTGTTGTTTGCCCCTCCCCCGTGCCTTCCTTGACCCTGG |
| | AAGGTGCCACTCCCACTGTCCTTTCCTAATAAAATGAGGAAATTGCATCGCATTGTCTGAGTAGGTGTCATTCTATTCTGGGGGGTGGGGTGGGGCAG |
| | GACAGCAAGGGGGAGGATTGGGAAGACAATAGCAGGCATGCTGGGGATGCGGTGGGCTCTATGGCTCTAGAGCATGGCTACGTAGATAAGTAGCATGG |
| | CGGGTTAATCATTAACTACACCTGCAGGAGGAACCCCTAGTGATGGAGTTGGCCACTCCCTCTCTGCGCGCTCGCTCGCTCACTGAGGCCGGGCGACC |
| | AAAGGTCGCCCGACGCCCGGGCGGCCTCAGTGAGCGAGCGAGCGCGCAGCTGCCTGCAGGGGCGCGCCTCGAGGCATGCGGTACCAAGCTTGTCGAGA |
| | AGTACTAGAGGATCATAATCAGCCATACCACATTTGTAGAGGTTTTACTTGCTTTAAAAAACCTCCCACACCTCCCCCTGAACCTGAAACATAAAATG |
| | AATGCAATTGTTGTTGTTAACTTGTTTATTGCAGCTTATAATGGTTACAAATAAAGCAATAGCATCACAAATTTCACAAATAAAGCATTTTTTTCACT |
| | GCATTCTAGTTGTGGTTTGTCCAAACTCATCAATGTATCTTATCATGTCTGGATCTGATCACTGATATCGCCTAGGAGATCCGAACCAGATAAGTGAA |
| | ATCTAGTTCCAAACTATTTTGTCATTTTTAATTTTCGTATTAGCTTACGACGCTACACCCAGTTCCCATCTATTTTGTCACTCTTCCCTAAATAATCC |
| | TTAAAAACTCCATTTCCACCCCTCCCAGTTCCCAACTATTTTGTCCGCCCACAGCGGGGCATTTTTCTTCCTGTTATGTTTTTAATCAAACATCCTGC |
| | CAACTCCATGTGACAAACCGTCATCTTCGGCTACTTTTTCTCTGTCACAGAATGAAAATTTTTCTGTCATCTCTTCGTTATTAATGTTTGTAATTGAC |
| | TGAATATCAACGCTTATTTGCAGCCTGAATGGCGAATGGGACGCGCCCTGTAGCGGCGCATTAAGCGCGGCGGGTGTGGTGGTTACGCGCAGCGTGAC |
| | CGCTACACTTGCCAGCGCCCTAGCGCCCGCTCCTTTCGCTTTCTTCCCTTCCTTTCTCGCCACGTTCGCCGGCTTTCCCCGTCAAGCTCTAAATCGGG |
| | GGCTCCCTTTAGGGTTCCGATTTAGTGCTTTACGGCACCTCGACCCCAAAAAACTTGATTAGGGTGATGGTTCACGTAGTGGGCCATCGCCCTGATAG |
| | ACGGTTTTTCGCCCTTTGACGTTGGAGTCCACGTTCTTTAATAGTGGACTCTTGTTCCAAACTGGAACAACACTCAACCCTATCTCGGTCTATTCTTT |
| | TGATTTATAAGGGATTTTGCCGATTTCGGCCTATTGGTTAAAAAATGAGCTGATTTAACAAAAATTTAACGCGAATTTTAACAAAATATTAACGTTTA |
| | CAATTTCAGGTGGCACTTTTCGGGGAAATGTGCGCGGAACCCCTATTTGTTTATTTTTCTAAATACATTCAAATATGTATCCGCTCATGAGACAATAA |
| | CCCTGATAAATGCTTCAATAATATTGAAAAAGGAAGAGTATGAGTATTCAACATTTCCGTGTCGCCCTTATTCCCTTTTTTGCGGCATTTTGCCTTCC |
| | TGTTTTTGCTCACCCAGAAACGCTGGTGAAAGTAAAAGATGCTGAAGATCAGTTGGGTGCACGAGTGGGTTACATCGAACTGGATCTCAACAGCGGTA |
| | AGATCCTTGAGAGTTTTCGCCCCGAAGAACGTTTTCCAATGATGAGCACTTTTAAAGTTCTGCTATGTGGCGCGGTATTATCCCGTATTGACGCCGGG |
| | CAAGAGCAACTCGGTCGCCGCATACACTATTCTCAGAATGACTTGGTTGAGTACTCACCAGTCACAGAAAAGCATCTTACGGATGGCATGACAGTAAG |
| | AGAATTATGCAGTGCTGCCATAACCATGAGTGATAACACTGCGGCCAACTTACTTCTGACAACGATCGGAGGACCGAAGGAGCTAACCGCTTTTTTGC |
| | ACAACATGGGGGATCATGTAACTCGCCTTGATCGTTGGGAACCGGAGCTGAATGAAGCCATACCAAACGACGAGCGTGACACCACGATGCCTGTAGCA |
| | ATGGCAACAACGTTGCGCAAACTATTAACTGGCGAACTACTTACTCTAGCTTCCCGGCAACAATTAATAGACTGGATGGAGGCGGATAAAGTTGCAGG |
| | ACCACTTCTGCGCTCGGCCCTTCCGGCTGGCTGGTTTATTGCTGATAAATCTGGAGCCGGTGAGCGTGGGTCTCGCGGTATCATTGCAGCACTGGGGC |
| | CAGATGGTAAGCCCTCCCGTATCGTAGTTATCTACACGACGGGGAGTCAGGCAACTATGGATGAACGAAATAGACAGATCGCTGAGATAGGTGCCTCA |
| | CTGATTAAGCATTGGTAACTGTCAGACCAAGTTTACTCATATATACTTTAGATTGATTTAAAACTTCATTTTTAATTTAAAAGGATCTAGGTGAAGAT |
| | CCTTTTTGATAATCTCATGACCAAAATCCCTTAACGTGAGTTTTCGTTCCACTGAGCGTCAGACCCCGTAGAAAAGATCAAAGGATCTTCTTGAGATC |
| | CTTTTTTTCTGCGCGTAATCTGCTGCTTGCAAACAAAAAAACCACCGCTACCAGCGGTGGTTTGTTTGCCGGATCAAGAGCTACCAACTCTTTTTCCG |
| | AAGGTAACTGGCTTCAGCAGAGCGCAGATACCAAATACTGTCCTTCTAGTGTAGCCGTAGTTAGGCCACCACTTCAAGAACTCTGTAGCACCGCCTAC |
| | ATACCTCGCTCTGCTAATCCTGTTACCAGTGGCTGCTGCCAGTGGCGATAAGTCGTGTCTTACCGGGTTGGACTCAAGACGATAGTTACCGGATAAGG |
| | CGCAGCGGTCGGGCTGAACGGGGGGTTCGTGCACACAGCCCAGCTTGGAGCGAACGACCTACACCGAACTGAGATACCTACAGCGTGAGCATTGAGAA |
| | AGCGCCACGCTTCCCGAAGGGAGAAAGGCGGACAGGTATCCGGTAAGCGGCAGGGTCGGAACAGGAGAGCGCACGAGGGAGCTTCCAGGGGGAAACGC |
| | CTGGTATCTTTATAGTCCTGTCGGGTTTCGCCACCTCTGACTTGAGCGTCGATTTTTGTGATGCTCGTCAGGGGGGCGGAGCCTATGGAAAAACGCCA |
| | GCAACGCGGCCTTTTTACGGTTCCTGGCCTTTTGCTGGCCTTTTGCTCACATGTTCTTTCCTGCGTTATCCCCTGATTCTGTGGATAACCGTATTACC |
| | GCCTTTGAGTGAGCTGATACCGCTCGCCGCAGCCGAACGACCGAGCGCAGCGAGTCAGTGAGCGAGGAAGCGGAAGAGCGCCTGATGCGGTATTTTCT |
| | CCTTACGCATCTGTGCGGTATTTCACACCGCAGACCAGCCGCGTAACCTGGCAAAATCGGTTACGGTTGAGTAATAAATGGATGCCCTGCGTAAGCGG |
| | GTGTGGGCGGACAATAAAGTCTTAAACTGAACAAAATAGATCTAAACTATGACAATAAAGTCTTAAACTAGACAGAATAGTTGTAAACTGAAATCAGT |
| | CCAGTTATGCTGTGAAAAAGCATACTGGACTTTTGTTATGGCTAAAGCAAACTCTTCATTTTCTGAAGTGCAAATTGCCCGTCGTATTAAAGAGGGGC |
| | GTGGCCAAGGGCATGGTAAAGACTATATTCGCGGCGTTGTGACAATTTACCGAACAACTCCGCGGCCGGGAAGCCGATCTCGGCTTGAACGAATTGTT |
| | AGGTGGCGGTACTTGGGTCGATATCAAAGTGCATCACTTCTTCCCGTATGCCCAACTTTGTATAGAGAGCCACTGCGGGATCGTCACCGTAATCTGCT |
| | TGCACGTAGATCACATAAGCACCAAGCGCGTTGGCCTCATGCTTGAGGAGATTGATGAGCGCGGTGGCAATGCCCTGCCTCCGGTGCTCGCCGGAGAC |
| | TGCGAGATCATAGATATAGATCTCACTACGCGGCTGCTCAAACCTGGGCAGAACGTAAGCCGCGAGAGCGCCAACAACCGCTTCTTGGTCGAAGGCAG |
| | CAAGCGCGATGAATGTCTTACTACGGAGCAAGTTCCCGAGGTAATCGGAGTCCGGCTGATGTTGGGAGTAGGTGGCTACGTCTCCGAACTCACGACCG |
| | AAAAGATCAAGAGCAGCCCGCATGGATTTGACTTGGTCAGGGCCGAGCCTACATGTGCGAATGATGCCCATACTTGAGCCACCTAACTTTGTTTTAGG |
| | GCGACTGCCCTGCTGCGTAACATCGTTGCTGCTGCGTAACATCGTTGCTGCTCCATAACATCAAACATCGACCCACGGCGTAACGCGCTTGCTGCTTG |
| | GATGCCCGAGGCATAGACTGTACAAAAAAACAGTCATAACAAGCCATGAAAACCGCCACTGCGCCGTTACCACCGCTGCGTTCGGTCAAGGTTCTGGA |
| | CCAGTTGCGTGAGCGCATACGCTACTTGCATTACAGTTTACGAACCGAACAGGCTTATGTCAACTGGGTTCGTGCCTTCATCCGTTTCCACGGTGTGC |
| | GTCACCCGGCAACCTTGGGCAGCAGCGAAGTCGAGGCATTTCTGTCCTGGCTGGCGAACGAGCGCAAGGTTTCGGTCTCCACGCATCGTCAGGCATTG |
| | GCGGCCTTGCTGTTCTTCTACGGCAAGGTGCTGTGCACGGATCTGCCCTGGCTTCAGGAGATCGGAAGACCTCGGCCGTCGCGGCGCTTGCCGGTGGT |
| | GCTGACCCCGGATGAAGTGGTTCGCATCCTCGGTTTTCTGGAAGGCGAGCATCGTTTGTTCGCCCAGGACTCTAGCTATAGTTCTAGTGGTTGGCTAC |
| | GTATACTCCGGAATATTAATAGATCATGGAGATAATTAAAATGATAACCATCTCGCAAATAAATAAGTATTTTACTGTTTTCGTAACAGTTTTGTAAT |
| | AAAAAAACCTATAAATATTCCGGATTATTCATACCGTCCCACCATCGGGCGCGGATCTCGGTCCGAAACCATGTCGTACTACCATCACCATCACCATC |
| | ACGATTACGATATCCCAACGACCGAAAACCTGTATTTTCAGGGCGCCATGGGATCC |
| ceDNAFVIII- | GGCCGGCCCCTGCAGGCAGCTGCGCGCTCGCTCGCTCACTGAGGCCGCCCGGGCAAAGCCCGGGCGTCGGGCGACCTTTGGTCGCCCGGCCTCAGTGA |
| vector 22 | GCGAGCGAGCGCGCAGAGAGGGAGTGGCCAACTCCATCACTAGGGGTTCCTTGTAGTTAATGATTAACCCGCCATGCTACTTATCTACGTAGCCATGC |
| (SEQ ID NO: | TCTAGAGAGTCAATGGGAAAAACCCATTGGAGCCAAGTACACTGACTCAATAGGGACTTTCCATTGGGTTTTGCCCAGTACATAAGGTCAATAGGGGG |
| 213) | TGAGTCAACAGGAAAGTCCCATTGGAGCCAAGTACATTGAGTCAATAGGGACTTTCCAATGGGTTTTGCCCAGTACATAAGGTCAATGGGAGGTAAGC |
| | CAATGGGTTTTTCCCATTACTGACATGTATACTGAGTCATTAGGGACTTTCCAATGGGTTTTGCCCAGTACATAAGGTCAATAGGGGTGAATCAACAG |
| | GAAAGTCCCATTGGAGCCAAGTACACTGAGTCAATAGGGACTTTCCATTGGGTTTTGCCCAGTACAAAAGGTCAATAGGGGGTGAGTCAATGGGTTTT |
| | TCCCATTATTGGCACATACATAAGGTCAATAGGGGTGACTAGTGGAGAAGAGCATGCTTGAGGGCTGAGTGCCCCTCAGTGGGCAGAGAGCACATGGC |
| | CCACAGTCCCTGAGAAGTTGGGGGGAGGGGTGGGCAATTGAACTGGTGCCTAGAGAAGGTGGGGCTTGGGTAAACTGGGAAAGTGATGTGGTGTACTG |
| | GCTCCACCTTTTTCCCCAGGGTGGGGGAGAACCATATATAAGTGCAGTAGTCTCTGTGAACATTCAAGCTTCTGCCTTCTCCCTCCTGTGAGTTTGGT |
| | AAGTCACTGACTGTCTATGCCTGGGAAAGGGTGGGCAGGAGATGGGGCAGTGCAGGAAAAGTGGCACTATGAACCCTGCAGCCCTAGACAATTGTACT |
| | AACCTTCTTCTCTTTCCTCTCCTGACAGGTTGGTGTACAGTAGCTTCCGTTTAAACGCCGCCACCATGCAGATTGAGCTGAGCACCTGCTTCTTCCTG |
| | TGCCTGCTGAGGTTCTGCTTCTCTGCCACCAGGAGATACTACCTGGGGGCTGTGGAGCTGAGCTGGGACTACATGCAGTCTGACCTGGGGGAGCTGCC |
| | TGTGGATGCCAGGTTCCCCCCCAGAGTGCCCAAGAGCTTCCCCTTCAACACCTCTGTGGTGTACAAGAAGACCCTGTTTGTGGAGTTCACTGACCACC |
| | TGTTCAACATTGCCAAGCCCAGGCCCCCCTGGATGGGCCTGCTGGGCCCCACCATCCAGGCTGAGGTGTATGACACTGTGGTGATCACCCTGAAGAAC |
| | ATGGCCAGCCACCCTGTGAGCCTGCATGCTGTGGGGGTGAGCTACTGGAAGGCCTCTGAGGGGGCTGAGTATGATGACCAGACCAGCCAGAGGGAGAA |
| | GGAGGATGACAAGGTGTTCCCTGGGGGCAGCCACACCTATGTGTGGCAGGTGCTGAAGGAGAATGGCCCCATGGCCTCTGACCCCCTGTGCCTGACCT |
| | ACAGCTACCTGAGCCATGTGGACCTGGTGAAGGACCTGAACTCTGGCCTGATTGGGGCCCTGCTGGTGTGCAGGGAGGGCAGCCTGGCCAAGGAGAAG |
| | ACCCAGACCCTGCACAAGTTCATCCTGCTGTTTGCTGTGTTTGATGAGGGCAAGAGCTGGCACTCTGAAACCAAGAACAGCCTGATGCAGGACAGGGA |
| | TGCTGCCTCTGCCAGGGCCTGGCCCAAGATGCACACTGTGAATGGCTATGTGAACAGGAGCCTGCCTGGCCTGATTGGCTGCCACAGGAAGTCTGTGT |
| | ACTGGCATGTGATTGGCATGGGCACCACCCCTGAGGTGCACAGCATCTTCCTGGAGGGCCACACCTTCCTGGTCAGGAACCACAGGCAGGCCAGCCTG |
| | GAGATCAGCCCCATCACCTTCCTGACTGCCCAGACCCTGCTGATGGACCTGGGCCAGTTCCTGCTGTTCTGCCACATCAGCAGCCACCAGCATGATGG |
| | CATGGAGGCCTATGTGAAGGTGGACAGCTGCCCTGAGGAGCCCCAGCTGAGGATGAAGAACAATGAGGAGGCTGAGGACTATGATGATGACCTGACTG |
| | ACTCTGAGATGGATGTGGTGAGGTTTGATGATGACAACAGCCCCAGCTTCATCCAGATCAGGTCTGTGGCCAAGAAGCACCCCAAGACCTGGGTGCAC |
| | TACATTGCTGCTGAGGAGGAGGACTGGGACTATGCCCCCCTGGTGCTGGCCCCTGATGACAGGAGCTACAAGAGCCAGTACCTGAACAATGGCCCCCA |
| | GAGGATTGGCAGGAAGTACAAGAAGGTCAGGTTCATGGCCTACACTGATGAAACCTTCAAGACCAGGGAGGCCATCCAGCATGAGTCTGGCATCCTGG |
| | GCCCCCTGCTGTATGGGGAGGTGGGGGACACCCTGCTGATCATCTTCAAGAACCAGGCCAGCAGGCCCTACAACATCTACCCCCATGGCATCACTGAT |
| | GTGAGGCCCCTGTACAGCAGGAGGCTGCCCAAGGGGGTGAAGCACCTGAAGGACTTCCCCATCCTGCCTGGGGAGATCTTCAAGTACAAGTGGACTGT |
| | GACTGTGGAGGATGGCCCCACCAAGTCTGACCCCAGGTGCCTGACCAGATACTACAGCAGCTTTGTGAACATGGAGAGGGACCTGGCCTCTGGCCTGA |
| | TTGGCCCCCTGCTGATCTGCTACAAGGAGTCTGTGGACCAGAGGGGCAACCAGATCATGTCTGACAAGAGGAATGTGATCCTGTTCTCTGTGTTTGAT |
| | GAGAACAGGAGCTGGTACCTGACTGAGAACATCCAGAGGTTCCTGCCCAACCCTGCTGGGGTGCAGCTGGAGGACCCTGAGTTCCAGGCCAGCAACAT |
| | CATGCACAGCATCAATGGCTATGTGTTTGACAGCCTGCAGCTGTCTGTGTGCCTGCATGAGGTGGCCTACTGGTACATCCTGAGCATTGGGGCCCAGA |
| | CTGACTTCCTGTCTGTGTTCTTCTCTGGCTACACCTTCAAGCACAAGATGGTGTATGAGGACACCCTGACCCTGTTCCCCTTCTCTGGGGAGACTGTG |
| | TTCATGAGCATGGAGAACCCTGGCCTGTGGATTCTGGGCTGCCACAACTCTGACTTCAGGAACAGGGGCATGACTGCCCTGCTGAAAGTCTCCAGCTG |
| | TGACAAGAACACTGGGGACTACTATGAGGACAGCTATGAGGACATCTCTGCCTACCTGCTGAGCAAGAACAATGCCATTGAGCCCAGGAGCTTCAGCC |
| | AGAATGCCACTAATGTGTCTAACAACAGCAACACCAGCAATGACAGCAATGTGTCTCCCCCAGTGCTGAAGAGGCACCAGAGGGAGATCACCAGGACC |
| | ACCCTGCAGTCTGACCAGGAGGAGATTGACTATGATGACACCATCTCTGTGGAGATGAAGAAGGAGGACTTTGACATCTACGACGAGGACGAGAACCA |
| | GAGCCCCAGGAGCTTCCAGAAGAAGACCAGGCACTACTTCATTGCTGCTGTGGAGAGGCTGTGGGACTATGGCATGAGCAGCAGCCCCCATGTGCTGA |
| | GGAACAGGGCCCAGTCTGGCTCTGTGCCCCAGTTCAAGAAGGTGGTGTTCCAGGAGTTCACTGATGGCAGCTTCACCCAGCCCCTGTACAGAGGGGAG |
| | CTGAATGAGCACCTGGGCCTGCTGGGCCCCTACATCAGGGCTGAGGTGGAGGACAACATCATGGTGACCTTCAGGAACCAGGCCAGCAGGCCCTACAG |
| | CTTCTACAGCAGCCTGATCAGCTATGAGGAGGACCAGAGGCAGGGGGCTGAGCCCAGGAAGAACTTTGTGAAGCCCAATGAAACCAAGACCTACTTCT |
| | GGAAGGTGCAGCACCACATGGCCCCCACCAAGGATGAGTTTGACTGCAAGGCCTGGGCCTACTTCTCTGATGTGGACCTGGAGAAGGATGTGCACTCT |
| | GGCCTGATTGGCCCCCTGCTGGTGTGCCACACCAACACCCTGAACCCTGCCCATGGCAGGCAGGTGACTGTGCAGGAGTTTGCCCTGTTCTTCACCAT |
| | CTTTGATGAAACCAAGAGCTGGTACTTCACTGAGAACATGGAGAGGAACTGCAGGGCCCCCTGCAACATCCAGATGGAGGACCCCACCTTCAAGGAGA |
| | ACTACAGGTTCCATGCCATCAATGGCTACATCATGGACACCCTGCCTGGCCTGGTGATGGCCCAGGACCAGAGGATCAGGTGGTACCTGCTGAGCATG |
| | GGCAGCAATGAGAACATCCACAGCATCCACTTCTCTGGCCATGTGTTCACTGTGAGGAAGAAGGAGGAGTACAAGATGGCCCTGTACAACCTGTACCC |
| | TGGGGTGTTTGAGACTGTGGAGATGCTGCCCAGCAAGGCTGGCATCTGGAGGGTGGAGTGCCTGATTGGGGAGCACCTGCATGCTGGCATGAGCACCC |
| | TGTTCCTGGTGTACAGCAACAAGTGCCAGACCCCCCTGGGCATGGCCTCTGGCCACATCAGGGACTTCCAGATCACTGCCTCTGGCCAGTATGGCCAG |
| | TGGGCCCCCAAGCTGGCCAGGCTGCACTACTCTGGCAGCATCAATGCCTGGAGCACCAAGGAGCCCTTCAGCTGGATCAAGGTGGACCTGCTGGCCCC |
| | CATGATCATCCATGGCATCAAGACCCAGGGGGCCAGGCAGAAGTTCAGCAGCCTGTACATCAGCCAGTTCATCATCATGTACAGCCTGGATGGCAAGA |
| | AGTGGCAGACCTACAGGGGCAACAGCACTGGCACCCTGATGGTGTTCTTTGGCAATGTGGACAGCTCTGGCATCAAGCACAACATCTTCAACCCCCCC |
| | ATCATTGCCAGATACATCAGGCTGCACCCCACCCACTACAGCATCAGGAGCACCCTGAGGATGGAGCTGATGGGCTGTGACCTGAACAGCTGCAGCAT |
| | GCCCCTGGGCATGGAGAGCAAGGCCATCTCTGATGCCCAGATCACTGCCAGCAGCTACTTCACCAACATGTTTGCCACCTGGAGCCCCAGCAAGGCCA |
| | GGCTGCACCTGCAGGGCAGGAGCAATGCCTGGAGGCCCCAGGTCAACAACCCCAAGGAGTGGCTGCAGGTGGACTTCCAGAAGACCATGAAGGTGACT |
| | GGGGTGACCACCCAGGGGGTGAAGAGCCTGCTGACCAGCATGTATGTGAAGGAGTTCCTGATCAGCAGCAGCCAGGATGGCCACCAGTGGACCCTGTT |
| | CTTCCAGAATGGCAAGGTGAAGGTGTTCCAGGGCAACCAGGACAGCTTCACCCCTGTGGTGAACAGCCTGGACCCCCCCCTGCTGACCAGATACCTGA |
| | GGATTCACCCCCAGAGCTGGGTGCACCAGATTGCCCTGAGGATGGAGGTGCTGGGCTGTGAGGCCCAGGACCTGTACTGATTAATTAAGAGCATCTTA |
| | CCGCCATTTATTCCCATATTTGTTCTGTTTTTCTTGATTTGGGTATACATTTAAATGTTAATAAAACAAAATGGTGGGGCAATCATTTACATTTTTAG |
| | GGATATGTAATTACTAGTTCAGGTGTATTGCCACAAGACAAACATGTTAAGAAACTTTCCCGTTATTTACGCTCTGTTCCTGTTAATCAACCTCTGGA |
| | TTACAAAATTTGTGAAAGATTGACTGATATTCTTAACTATGTTGCTCCTTTTACGCTGTGTGGATATGCTGCTTTATAGCCTCTGTATCTAGCTATTG |
| | CTTCCCGTACGGCTTTCGTTTTCTCCTCCTTGTATAAATCCTGGTTGCTGTCTCTTTTAGAGGAGTTGTGGCCCGTTGTCCGTCAACGTGGCGTGGTG |
| | TGCTCTGTGTTTGCTGACGCAACCCCCACTGGCTGGGGCATTGCCACCACCTGTCAACTCCTTTCTGGGACTTTCGCTTTCCCCCTCCCGATCGCCAC |
| | GGCAGAACTCATCGCCGCCTGCCTTGCCCGCTGCTGGACAGGGGCTAGGTTGCTGGGCACTGATAATTCCGTGGTGTTGTCTCCATAAAGTAGGAAAC |
| | ACTACACGATTCCATAAAGTAGGAAACACTACATCACTCCATAAAGTAGGAAACACTACATGTGCCTTCTAGTTGCCAGCCATCTGTTGTTTGCCCCT |
| | CCCCCGTGCCTTCCTTGACCCTGGAAGGTGCCACTCCCACTGTCCTTTCCTAATAAAATGAGGAAATTGCATCGCATTGTCTGAGTAGGTGTCATTCT |
| | ATTCTGGGGGGTGGGGTGGGGCAGGACAGCAAGGGGGAGGATTGGGAAGACAATAGCAGGCATGCTGGGGATGCGGTGGGCTCTATGGCTCTAGATCT |
| | AGAGCATGGCTACGTAGATAAGTAGCATGGCGGGTTAATCATTAACTACACCTGCAGGAGGAACCCCTAGTGATGGAGTTGGCCACTCCCTCTCTGCG |
| | CGCTCGCTCGCTCACTGAGGCCGGGCGACCAAAGGTCGCCCGACGCCCGGGCGGCCTCAGTGAGCGAGCGAGCGCGCAGCTGCCTGCAGGGGCGCGCC |
| | TCGAGGCATGCGGTACCAAGCTTGTCGAGAAGTACTAGAGGATCATAATCAGCCATACCACATTTGTAGAGGTTTTACTTGCTTTAAAAAACCTCCCA |
| | CACCTCCCCCTGAACCTGAAACATAAAATGAATGCAATTGTTGTTGTTAACTTGTTTATTGCAGCTTATAATGGTTACAAATAAAGCAATAGCATCAC |
| | AAATTTCACAAATAAAGCATTTTTTTCACTGCATTCTAGTTGTGGTTTGTCCAAACTCATCAATGTATCTTATCATGTCTGGATCTGATCACTGATAT |
| | CGCCTAGGAGATCCGAACCAGATAAGTGAAATCTAGTTCCAAACTATTTTGTCATTTTTAATTTTCGTATTAGCTTACGACGCTACACCCAGTTCCCA |
| | TCTATTTTGTCACTCTTCCCTAAATAATCCTTAAAAACTCCATTTCCACCCCTCCCAGTTCCCAACTATTTTGTCCGCCCACAGCGGGGCATTTTTCT |
| | TCCTGTTATGTTTTTAATCAAACATCCTGCCAACTCCATGTGACAAACCGTCATCTTCGGCTACTTTTTCTCTGTCACAGAATGAAAATTTTTCTGTC |
| | ATCTCTTCGTTATTAATGTTTGTAATTGACTGAATATCAACGCTTATTTGCAGCCTGAATGGCGAATGGGACGCGCCCTGTAGCGGCGCATTAAGCGC |
| | GGCGGGTGTGGTGGTTACGCGCAGCGTGACCGCTACACTTGCCAGCGCCCTAGCGCCCGCTCCTTTCGCTTTCTTCCCTTCCTTTCTCGCCACGTTCG |
| | CCGGCTTTCCCCGTCAAGCTCTAAATCGGGGGCTCCCTTTAGGGTTCCGATTTAGTGCTTTACGGCACCTCGACCCCAAAAAACTTGATTAGGGTGAT |
| | GGTTCACGTAGTGGGCCATCGCCCTGATAGACGGTTTTTCGCCCTTTGACGTTGGAGTCCACGTTCTTTAATAGTGGACTCTTGTTCCAAACTGGAAC |
| | AACACTCAACCCTATCTCGGTCTATTCTTTTGATTTATAAGGGATTTTGCCGATTTCGGCCTATTGGTTAAAAAATGAGCTGATTTAACAAAAATTTA |
| | ACGCGAATTTTAACAAAATATTAACGTTTACAATTTCAGGTGGCACTTTTCGGGGAAATGTGCGCGGAACCCCTATTTGTTTATTTTTCTAAATACAT |
| | TCAAATATGTATCCGCTCATGAGACAATAACCCTGATAAATGCTTCAATAATATTGAAAAAGGAAGAGTATGAGTATTCAACATTTCCGTGTCGCCCT |
| | TATTCCCTTTTTTGCGGCATTTTGCCTTCCTGTTTTTGCTCACCCAGAAACGCTGGTGAAAGTAAAAGATGCTGAAGATCAGTTGGGTGCACGAGTGG |
| | GTTACATCGAACTGGATCTCAACAGCGGTAAGATCCTTGAGAGTTTTCGCCCCGAAGAACGTTTTCCAATGATGAGCACTTTTAAAGTTCTGCTATGT |
| | GGCGCGGTATTATCCCGTATTGACGCCGGGCAAGAGCAACTCGGTCGCCGCATACACTATTCTCAGAATGACTTGGTTGAGTACTCACCAGTCACAGA |
| | AAAGCATCTTACGGATGGCATGACAGTAAGAGAATTATGCAGTGCTGCCATAACCATGAGTGATAACACTGCGGCCAACTTACTTCTGACAACGATCG |
| | GAGGACCGAAGGAGCTAACCGCTTTTTTGCACAACATGGGGGATCATGTAACTCGCCTTGATCGTTGGGAACCGGAGCTGAATGAAGCCATACCAAAC |
| | GACGAGCGTGACACCACGATGCCTGTAGCAATGGCAACAACGTTGCGCAAACTATTAACTGGCGAACTACTTACTCTAGCTTCCCGGCAACAATTAAT |
| | AGACTGGATGGAGGCGGATAAAGTTGCAGGACCACTTCTGCGCTCGGCCCTTCCGGCTGGCTGGTTTATTGCTGATAAATCTGGAGCCGGTGAGCGTG |
| | GGTCTCGCGGTATCATTGCAGCACTGGGGCCAGATGGTAAGCCCTCCCGTATCGTAGTTATCTACACGACGGGGAGTCAGGCAACTATGGATGAACGA |
| | AATAGACAGATCGCTGAGATAGGTGCCTCACTGATTAAGCATTGGTAACTGTCAGACCAAGTTTACTCATATATACTTTAGATTGATTTAAAACTTCA |
| | TTTTTAATTTAAAAGGATCTAGGTGAAGATCCTTTTTGATAATCTCATGACCAAAATCCCTTAACGTGAGTTTTCGTTCCACTGAGCGTCAGACCCCG |
| | TAGAAAAGATCAAAGGATCTTCTTGAGATCCTTTTTTTCTGCGCGTAATCTGCTGCTTGCAAACAAAAAAACCACCGCTACCAGCGGTGGTTTGTTTG |
| | CCGGATCAAGAGCTACCAACTCTTTTTCCGAAGGTAACTGGCTTCAGCAGAGCGCAGATACCAAATACTGTCCTTCTAGTGTAGCCGTAGTTAGGCCA |
| | CCACTTCAAGAACTCTGTAGCACCGCCTACATACCTCGCTCTGCTAATCCTGTTACCAGTGGCTGCTGCCAGTGGCGATAAGTCGTGTCTTACCGGGT |
| | TGGACTCAAGACGATAGTTACCGGATAAGGCGCAGCGGTCGGGCTGAACGGGGGGTTCGTGCACACAGCCCAGCTTGGAGCGAACGACCTACACCGAA |
| | CTGAGATACCTACAGCGTGAGCATTGAGAAAGCGCCACGCTTCCCGAAGGGAGAAAGGCGGACAGGTATCCGGTAAGCGGCAGGGTCGGAACAGGAGA |
| | GCGCACGAGGGAGCTTCCAGGGGGAAACGCCTGGTATCTTTATAGTCCTGTCGGGTTTCGCCACCTCTGACTTGAGCGTCGATTTTTGTGATGCTCGT |
| | CAGGGGGGCGGAGCCTATGGAAAAACGCCAGCAACGCGGCCTTTTTACGGTTCCTGGCCTTTTGCTGGCCTTTTGCTCACATGTTCTTTCCTGCGTTA |
| | TCCCCTGATTCTGTGGATAACCGTATTACCGCCTTTGAGTGAGCTGATACCGCTCGCCGCAGCCGAACGACCGAGCGCAGCGAGTCAGTGAGCGAGGA |
| | AGCGGAAGAGCGCCTGATGCGGTATTTTCTCCTTACGCATCTGTGCGGTATTTCACACCGCAGACCAGCCGCGTAACCTGGCAAAATCGGTTACGGTT |
| | GAGTAATAAATGGATGCCCTGCGTAAGCGGGTGTGGGCGGACAATAAAGTCTTAAACTGAACAAAATAGATCTAAACTATGACAATAAAGTCTTAAAC |
| | TAGACAGAATAGTTGTAAACTGAAATCAGTCCAGTTATGCTGTGAAAAAGCATACTGGACTTTTGTTATGGCTAAAGCAAACTCTTCATTTTCTGAAG |
| | TGCAAATTGCCCGTCGTATTAAAGAGGGGCGTGGCCAAGGGCATGGTAAAGACTATATTCGCGGCGTTGTGACAATTTACCGAACAACTCCGCGGCCG |
| | GGAAGCCGATCTCGGCTTGAACGAATTGTTAGGTGGCGGTACTTGGGTCGATATCAAAGTGCATCACTTCTTCCCGTATGCCCAACTTTGTATAGAGA |
| | GCCACTGCGGGATCGTCACCGTAATCTGCTTGCACGTAGATCACATAAGCACCAAGCGCGTTGGCCTCATGCTTGAGGAGATTGATGAGCGCGGTGGC |
| | AATGCCCTGCCTCCGGTGCTCGCCGGAGACTGCGAGATCATAGATATAGATCTCACTACGCGGCTGCTCAAACCTGGGCAGAACGTAAGCCGCGAGAG |
| | CGCCAACAACCGCTTCTTGGTCGAAGGCAGCAAGCGCGATGAATGTCTTACTACGGAGCAAGTTCCCGAGGTAATCGGAGTCCGGCTGATGTTGGGAG |
| | TAGGTGGCTACGTCTCCGAACTCACGACCGAAAAGATCAAGAGCAGCCCGCATGGATTTGACTTGGTCAGGGCCGAGCCTACATGTGCGAATGATGCC |
| | CATACTTGAGCCACCTAACTTTGTTTTAGGGCGACTGCCCTGCTGCGTAACATCGTTGCTGCTGCGTAACATCGTTGCTGCTCCATAACATCAAACAT |
| | CGACCCACGGCGTAACGCGCTTGCTGCTTGGATGCCCGAGGCATAGACTGTACAAAAAAACAGTCATAACAAGCCATGAAAACCGCCACTGCGCCGTT |
| | ACCACCGCTGCGTTCGGTCAAGGTTCTGGACCAGTTGCGTGAGCGCATACGCTACTTGCATTACAGTTTACGAACCGAACAGGCTTATGTCAACTGGG |
| | TTCGTGCCTTCATCCGTTTCCACGGTGTGCGTCACCCGGCAACCTTGGGCAGCAGCGAAGTCGAGGCATTTCTGTCCTGGCTGGCGAACGAGCGCAAG |
| | GTTTCGGTCTCCACGCATCGTCAGGCATTGGCGGCCTTGCTGTTCTTCTACGGCAAGGTGCTGTGCACGGATCTGCCCTGGCTTCAGGAGATCGGAAG |
| | ACCTCGGCCGTCGCGGCGCTTGCCGGTGGTGCTGACCCCGGATGAAGTGGTTCGCATCCTCGGTTTTCTGGAAGGCGAGCATCGTTTGTTCGCCCAGG |
| | ACTCTAGCTATAGTTCTAGTGGTTGGCTACGTATACTCCGGAATATTAATAGATCATGGAGATAATTAAAATGATAACCATCTCGCAAATAAATAAGT |
| | ATTTTACTGTTTTCGTAACAGTTTTGTAATAAAAAAACCTATAAATATTCCGGATTATTCATACCGTCCCACCATCGGGCGCGGATCTCGGTCCGAAA |
| | CCATGTCGTACTACCATCACCATCACCATCACGATTACGATATCCCAACGACCGAAAACCTGTATTTTCAGGGCGCCATGGGATCC |
| ceDNAFVIII- | GGCCGGCCCCTGCAGGCAGCTGCGCGCTCGCTCGCTCACTGAGGCCGCCCGGGCAAAGCCCGGGCGTCGGGCGACCTTTGGTCGCCCGGCCTCAGTGA |
| vector 23 | GCGAGCGAGCGCGCAGAGAGGGAGTGGCCAACTCCATCACTAGGGGTTCCTTGTAGTTAATGATTAACCCGCCATGCTACTTATCTACGTAGCCATGC |
| (SEQ ID NO: | TCTAGACGGGGGAGGCTGCTGGTGAATATTAACCAAGGTCACCCCAGTTATCGGAGGAGCAAACAGGGGCTAAGTCCACACGCGTGGTACCGTCTGTC |
| 214) | TGCACATTTCGTAGAGCGAGTGTTCCGATACTCTAATCTCCCTAGGCAAGGTTCATATTTGTGTAGGTTACTTATTCTCCTTTTGTTGACTAAGTCAA |
| | TAATCAGAATCAGCAGGTTTGGAGTCAGCTTGGCAGGGATCAGCAGCCTGGGTTGGAAGGAGGGGGTATAAAAGCCCCTTCACCAGGAGAAGCCGTCA |
| | CACAGATCCACAAGCTCCTGAAGAGGTAAGGGTTTAAGGGATGGTTGGTTGGTGGGGTATTAATGTTTAATTACCTGGAGCACCTGCCTGAAATCACT |
| | TTTTTTCAGGTTGGTTTAAACGCCGCCACCATGCAAATTGAGTTAAGTACCTGTTTTTTCCTGTGCCTGTTGAGATTTTGCTTCTCTGCTACCAGAAG |
| | GTATTACCTGGGAGCTGTGGAGCTGTCATGGGACTACATGCAGTCTGACCTGGGAGAGCTCCCTGTTGATGCTAGGTTTCCCCCTAGGGTGCCAAAGT |
| | CCTTTCCTTTTAACACCTCAGTGGTGTACAAGAAGACACTGTTTGTGGAGTTTACTGACCACCTCTTCAATATTGCTAAGCCAAGACCCCCTTGGATG |
| | GGTCTCTTGGGCCCTACCATCCAGGCTGAGGTTTATGATACAGTGGTGATTACCCTCAAGAATATGGCTTCTCATCCTGTTAGTCTGCATGCAGTAGG |
| | GGTCAGCTATTGGAAGGCCAGTGAAGGAGCTGAGTATGATGACCAGACCAGCCAGAGAGAGAAAGAGGATGACAAGGTGTTCCCTGGGGGATCACACA |
| | CCTATGTGTGGCAGGTGTTGAAGGAAAATGGACCCATGGCCTCTGACCCACTCTGCCTGACTTACTCCTACCTGTCTCATGTGGACCTGGTCAAAGAT |
| | CTGAACTCTGGCCTGATTGGGGCACTGTTGGTGTGCAGAGAAGGGTCTCTTGCCAAGGAGAAGACTCAGACCCTGCACAAGTTCATCCTGCTGTTTGC |
| | TGTGTTTGATGAAGGCAAGTCTTGGCATTCTGAGACTAAGAACAGCCTGATGCAAGATAGAGATGCTGCATCTGCCAGGGCCTGGCCTAAGATGCACA |
| | CTGTGAATGGATATGTGAATAGGTCCTTGCCTGGCCTGATTGGATGCCATAGGAAGTCTGTGTACTGGCATGTGATTGGCATGGGCACCACCCCTGAG |
| | GTTCACTCTATTTTTCTGGAGGGCCATACTTTCCTTGTGAGGAATCATAGACAGGCCTCTCTGGAGATTAGCCCTATTACATTTCTGACTGCTCAGAC |
| | CCTCCTCATGGACTTGGGGCAGTTTCTGTTAAGCTGCCACATCAGCAGCCATCAACATGATGGTATGGAAGCCTATGTCAAAGTGGATAGCTGCCCTG |
| | AAGAACCACAGCTTAGGATGAAGAACAATGAGGAGGCAGAGGACTATGATGATGATCTGACTGATTCTGAAATGGATGTGGTGAGATTTGATGATGAT |
| | AATAGCCCTTCCTTTATCCAGATCAGGTCAGTGGCCAAGAAGCACCCAAAGACCTGGGTGCATTATATTGCTGCTGAGGAGGAGGACTGGGACTATGC |
| | CCCTCTGGTGCTGGCCCCTGATGATAGAAGCTATAAGTCTCAATACTTGAATAATGGCCCACAGAGGATTGGGAGAAAGTACAAAAAGGTGAGATTTA |
| | TGGCCTACACTGATGAGACTTTCAAGACCAGAGAGGCCATCCAGCATGAATCAGGCATTTTGGGTCCCCTGCTGTATGGAGAGGTGGGGGATACCCTG |
| | CTGATCATCTTTAAGAACCAGGCCAGCAGACCTTACAACATTTACCCTCATGGGATCACAGATGTGAGGCCACTCTACTCTAGGAGATTGCCCAAGGG |
| | AGTCAAGCATCTTAAGGACTTTCCAATCCTGCCTGGGGAGATCTTCAAGTACAAATGGACAGTGACAGTTGAGGATGGACCTACTAAGAGTGACCCCA |
| | GGTGTCTGACCAGATATTACTCTAGCTTTGTCAATATGGAAAGAGACCTGGCTTCAGGCTTGATAGGCCCTCTTCTCATCTGCTACAAAGAGTCTGTG |
| | GACCAGAGAGGAAATCAGATTATGTCTGACAAGAGAAATGTTATTCTGTTTTCAGTCTTTGATGAGAACAGAAGTTGGTACTTGACAGAGAACATTCA |
| | GAGATTTCTGCCTAACCCTGCAGGAGTGCAGCTTGAGGACCCTGAGTTTCAGGCTTCCAATATCATGCATTCTATCAATGGCTATGTGTTTGATAGCC |
| | TGCAGCTGTCTGTGTGCCTGCATGAGGTTGCCTATTGGTACATCCTGTCTATTGGGGCCCAAACTGATTTCTTGTCTGTGTTTTTCAGTGGATATACC |
| | TTTAAGCATAAGATGGTGTATGAAGATACCTTGACACTTTTCCCTTTCTCAGGAGAGACTGTCTTCATGTCTATGGAGAACCCTGGACTGTGGATCCT |
| | GGGATGCCACAACTCAGACTTCAGAAACAGGGGTATGACAGCTCTGCTTAAGGTCTCCTCATGTGACAAAAATACAGGAGACTACTATGAAGATTCCT |
| | ATGAGGACATCTCTGCTTACCTGCTCAGCAAAAACAATGCCATTGAGCCCAGAAGCTTCAGCCAGAATTCCAGACATCCCAGTACTAGGCAGAAGCAG |
| | TTTAATGCCACCACCATCCCAGAAAATGACATTGAGAAGACAGACCCTTGGTTTGCCCATAGAACCCCAATGCCCAAGATTCAGAATGTGAGCAGCTC |
| | AGACTTGCTGATGCTGCTGAGGCAGTCTCCTACTCCCCATGGCCTGTCCCTCTCAGATCTGCAGGAAGCCAAGTATGAGACATTTTCTGATGACCCCT |
| | CCCCAGGGGCTATTGACAGTAACAACAGCCTGTCTGAAATGACCCACTTCAGACCTCAGCTCCACCACAGTGGGGATATGGTGTTTACCCCAGAGTCA |
| | GGCCTGCAGCTGAGACTGAATGAGAAGCTGGGAACCACAGCTGCCACAGAACTGAAGAAGCTGGATTTCAAGGTGAGCTCTACTTCAAATAATCTGAT |
| | TTCCACTATCCCATCTGACAATTTGGCAGCTGGCACTGACAATACAAGCTCTCTGGGCCCACCTAGCATGCCAGTGCATTATGACAGCCAGTTGGACA |
| | CCACTCTTTTTGGAAAGAAATCCAGTCCCCTGACAGAGTCAGGAGGACCCCTTTCTCTGTCTGAGGAGAACAATGATAGTAAGCTTCTGGAGTCAGGC |
| | TTGATGAACTCCCAGGAGAGTTCTTGGGGCAAGAATGTGAGCTCTAGGGAGATCACCAGAACCACTCTGCAGTCTGACCAAGAAGAGATTGATTATGA |
| | TGACACTATCTCTGTTGAGATGAAGAAGGAGGACTTTGATATCTATGATGAGGATGAGAACCAGTCTCCAAGAAGTTTCCAGAAGAAGACCAGGCACT |
| | ACTTTATTGCTGCTGTGGAGAGACTGTGGGACTATGGAATGTCCTCCTCCCCTCATGTCCTGAGAAATAGAGCTCAGTCAGGATCAGTGCCCCAGTTC |
| | AAGAAGGTGGTGTTCCAGGAATTCACAGATGGAAGTTTTACCCAGCCACTGTATAGAGGTGAACTGAATGAACATCTGGGTCTGCTGGGGCCCTATAT |
| | CAGGGCTGAGGTGGAGGACAATATTATGGTGACCTTTAGAAACCAGGCCTCAAGGCCCTACAGCTTCTACTCTTCCCTCATTTCATATGAGGAAGACC |
| | AGAGACAGGGAGCAGAGCCTAGAAAGAACTTTGTCAAGCCCAATGAAACCAAAACCTATTTCTGGAAGGTGCAGCACCACATGGCACCCACCAAAGAT |
| | GAGTTTGACTGCAAAGCCTGGGCCTATTTCTCAGATGTGGATCTGGAGAAGGATGTCCATTCAGGTCTGATTGGACCACTCCTGGTGTGCCACACCAA |
| | CACACTGAATCCAGCTCATGGCAGACAGGTGACAGTCCAGGAGTTTGCCCTGTTTTTCACTATTTTTGATGAGACCAAGAGCTGGTATTTTACAGAGA |
| | ATATGGAAAGAAACTGCAGAGCCCCTTGTAATATCCAGATGGAGGACCCAACCTTTAAGGAGAACTACAGGTTCCATGCCATCAATGGCTACATTATG |
| | GATACCCTGCCTGGCCTGGTTATGGCCCAGGATCAGAGGATCAGGTGGTATCTGCTGTCAATGGGCTCCAATGAGAACATTCATAGTATTCACTTTTC |
| | AGGACATGTGTTCACAGTGAGAAAGAAGGAGGAGTATAAGATGGCCCTCTATAATCTCTACCCAGGGGTGTTTGAGACAGTTGAGATGCTGCCATCTA |
| | AGGCAGGCATCTGGAGAGTGGAATGCCTCATTGGAGAGCACCTGCATGCTGGCATGTCCACCCTGTTTCTGGTGTACTCCAACAAATGTCAGACCCCT |
| | CTTGGTATGGCCTCTGGCCACATTAGGGATTTCCAGATTACTGCCAGTGGTCAGTATGGGCAGTGGGCCCCTAAGCTGGCCAGACTGCACTATTCTGG |
| | GAGCATCAATGCCTGGTCCACCAAGGAACCTTTTTCTTGGATTAAAGTGGATCTGCTGGCCCCAATGATCATCCATGGGATCAAGACCCAGGGAGCTA |
| | GGCAGAAGTTCAGCAGCCTGTACATTAGTCAGTTCATCATTATGTACAGTCTGGATGGCAAAAAGTGGCAGACATACAGGGGCAATTCCACTGGAACC |
| | CTGATGGTGTTCTTTGGAAATGTGGATAGCAGTGGTATCAAGCACAACATTTTCAACCCTCCCATCATTGCCAGGTACATCAGACTGCATCCAACCCA |
| | CTACAGCATTAGGAGCACCCTTAGGATGGAGCTCATGGGGTGTGACCTGAACTCTTGCTCTATGCCACTTGGAATGGAGAGCAAGGCCATCTCTGATG |
| | CCCAGATTACTGCTAGTTCCTACTTCACCAATATGTTTGCCACCTGGTCACCCAGCAAGGCCAGGCTGCACCTGCAGGGAAGGTCCAATGCTTGGAGG |
| | CCTCAGGTGAACAATCCAAAGGAGTGGCTGCAGGTGGACTTCCAGAAGACTATGAAGGTGACAGGAGTGACCACTCAGGGAGTGAAGAGCCTGCTGAC |
| | CTCCATGTATGTGAAGGAGTTTCTGATCTCCAGCTCCCAGGATGGCCACCAGTGGACCCTGTTCTTTCAGAATGGCAAGGTGAAGGTGTTTCAGGGGA |
| | ATCAGGACTCCTTCACCCCAGTGGTGAATTCCCTGGATCCCCCTCTGCTGACCAGATACCTGAGAATCCACCCCCAGTCTTGGGTGCACCAGATTGCC |
| | CTTAGGATGGAGGTGCTGGGCTGTGAGGCCCAGGACCTGTACTGATTAATTAAGAGCATCTTACCGCCATTTATTCCCATATTTGTTCTGTTTTTCTT |
| | GATTTGGGTATACATTTAAATGTTAATAAAACAAAATGGTGGGGCAATCATTTACATTTTTAGGGATATGTAATTACTAGTTCAGGTGTATTGCCACA |
| | AGACAAACATGTTAAGAAACTTTCCCGTTATTTACGCTCTGTTCCTGTTAATCAACCTCTGGATTACAAAATTTGTGAAAGATTGACTGATATTCTTA |
| | ACTATGTTGCTCCTTTTACGCTGTGTGGATATGCTGCTTTATAGCCTCTGTATCTAGCTATTGCTTCCCGTACGGCTTTCGTTTTCTCCTCCTTGTAT |
| | AAATCCTGGTTGCTGTCTCTTTTAGAGGAGTTGTGGCCCGTTGTCCGTCAACGTGGCGTGGTGTGCTCTGTGTTTGCTGACGCAACCCCCACTGGCTG |
| | GGGCATTGCCACCACCTGTCAACTCCTTTCTGGGACTTTCGCTTTCCCCCTCCCGATCGCCACGGCAGAACTCATCGCCGCCTGCCTTGCCCGCTGCT |
| | GGACAGGGGCTAGGTTGCTGGGCACTGATAATTCCGTGGTGTTGTCTGTGCCTTCTAGTTGCCAGCCATCTGTTGTTTGCCCCTCCCCCGTGCCTTCC |
| | TTGACCCTGGAAGGTGCCACTCCCACTGTCCTTTCCTAATAAAATGAGGAAATTGCATCGCATTGTCTGAGTAGGTGTCATTCTATTCTGGGGGGTGG |
| | GGTGGGGCAGGACAGCAAGGGGGAGGATTGGGAAGACAATAGCAGGCATGCTGGGGATGCGGTGGGCTCTATGGCTCTAGAGCATGGCTACGTAGATA |
| | AGTAGCATGGCGGGTTAATCATTAACTACACCTGCAGGAGGAACCCCTAGTGATGGAGTTGGCCACTCCCTCTCTGCGCGCTCGCTCGCTCACTGAGG |
| | CCGGGCGACCAAAGGTCGCCCGACGCCCGGGCGGCCTCAGTGAGCGAGCGAGCGCGCAGCTGCCTGCAGGGGCGCGCCTCGAGGCATGCGGTACCAAG |
| | CTTGTCGAGAAGTACTAGAGGATCATAATCAGCCATACCACATTTGTAGAGGTTTTACTTGCTTTAAAAAACCTCCCACACCTCCCCCTGAACCTGAA |
| | ACATAAAATGAATGCAATTGTTGTTGTTAACTTGTTTATTGCAGCTTATAATGGTTACAAATAAAGCAATAGCATCACAAATTTCACAAATAAAGCAT |
| | TTTTTTCACTGCATTCTAGTTGTGGTTTGTCCAAACTCATCAATGTATCTTATCATGTCTGGATCTGATCACTGATATCGCCTAGGAGATCCGAACCA |
| | GATAAGTGAAATCTAGTTCCAAACTATTTTGTCATTTTTAATTTTCGTATTAGCTTACGACGCTACACCCAGTTCCCATCTATTTTGTCACTCTTCCC |
| | TAAATAATCCTTAAAAACTCCATTTCCACCCCTCCCAGTTCCCAACTATTTTGTCCGCCCACAGCGGGGCATTTTTCTTCCTGTTATGTTTTTAATCA |
| | AACATCCTGCCAACTCCATGTGACAAACCGTCATCTTCGGCTACTTTTTCTCTGTCACAGAATGAAAATTTTTCTGTCATCTCTTCGTTATTAATGTT |
| | TGTAATTGACTGAATATCAACGCTTATTTGCAGCCTGAATGGCGAATGGGACGCGCCCTGTAGCGGCGCATTAAGCGCGGCGGGTGTGGTGGTTACGC |
| | GCAGCGTGACCGCTACACTTGCCAGCGCCCTAGCGCCCGCTCCTTTCGCTTTCTTCCCTTCCTTTCTCGCCACGTTCGCCGGCTTTCCCCGTCAAGCT |
| | CTAAATCGGGGGCTCCCTTTAGGGTTCCGATTTAGTGCTTTACGGCACCTCGACCCCAAAAAACTTGATTAGGGTGATGGTTCACGTAGTGGGCCATC |
| | GCCCTGATAGACGGTTTTTCGCCCTTTGACGTTGGAGTCCACGTTCTTTAATAGTGGACTCTTGTTCCAAACTGGAACAACACTCAACCCTATCTCGG |
| | TCTATTCTTTTGATTTATAAGGGATTTTGCCGATTTCGGCCTATTGGTTAAAAAATGAGCTGATTTAACAAAAATTTAACGCGAATTTTAACAAAATA |
| | TTAACGTTTACAATTTCAGGTGGCACTTTTCGGGGAAATGTGCGCGGAACCCCTATTTGTTTATTTTTCTAAATACATTCAAATATGTATCCGCTCAT |
| | GAGACAATAACCCTGATAAATGCTTCAATAATATTGAAAAAGGAAGAGTATGAGTATTCAACATTTCCGTGTCGCCCTTATTCCCTTTTTTGCGGCAT |
| | TTTGCCTTCCTGTTTTTGCTCACCCAGAAACGCTGGTGAAAGTAAAAGATGCTGAAGATCAGTTGGGTGCACGAGTGGGTTACATCGAACTGGATCTC |
| | AACAGCGGTAAGATCCTTGAGAGTTTTCGCCCCGAAGAACGTTTTCCAATGATGAGCACTTTTAAAGTTCTGCTATGTGGCGCGGTATTATCCCGTAT |
| | TGACGCCGGGCAAGAGCAACTCGGTCGCCGCATACACTATTCTCAGAATGACTTGGTTGAGTACTCACCAGTCACAGAAAAGCATCTTACGGATGGCA |
| | TGACAGTAAGAGAATTATGCAGTGCTGCCATAACCATGAGTGATAACACTGCGGCCAACTTACTTCTGACAACGATCGGAGGACCGAAGGAGCTAACC |
| | GCTTTTTTGCACAACATGGGGGATCATGTAACTCGCCTTGATCGTTGGGAACCGGAGCTGAATGAAGCCATACCAAACGACGAGCGTGACACCACGAT |
| | GCCTGTAGCAATGGCAACAACGTTGCGCAAACTATTAACTGGCGAACTACTTACTCTAGCTTCCCGGCAACAATTAATAGACTGGATGGAGGCGGATA |
| | AAGTTGCAGGACCACTTCTGCGCTCGGCCCTTCCGGCTGGCTGGTTTATTGCTGATAAATCTGGAGCCGGTGAGCGTGGGTCTCGCGGTATCATTGCA |
| | GCACTGGGGCCAGATGGTAAGCCCTCCCGTATCGTAGTTATCTACACGACGGGGAGTCAGGCAACTATGGATGAACGAAATAGACAGATCGCTGAGAT |
| | AGGTGCCTCACTGATTAAGCATTGGTAACTGTCAGACCAAGTTTACTCATATATACTTTAGATTGATTTAAAACTTCATTTTTAATTTAAAAGGATCT |
| | AGGTGAAGATCCTTTTTGATAATCTCATGACCAAAATCCCTTAACGTGAGTTTTCGTTCCACTGAGCGTCAGACCCCGTAGAAAAGATCAAAGGATCT |
| | TCTTGAGATCCTTTTTTTCTGCGCGTAATCTGCTGCTTGCAAACAAAAAAACCACCGCTACCAGCGGTGGTTTGTTTGCCGGATCAAGAGCTACCAAC |
| | TCTTTTTCCGAAGGTAACTGGCTTCAGCAGAGCGCAGATACCAAATACTGTCCTTCTAGTGTAGCCGTAGTTAGGCCACCACTTCAAGAACTCTGTAG |
| | CACCGCCTACATACCTCGCTCTGCTAATCCTGTTACCAGTGGCTGCTGCCAGTGGCGATAAGTCGTGTCTTACCGGGTTGGACTCAAGACGATAGTTA |
| | CCGGATAAGGCGCAGCGGTCGGGCTGAACGGGGGGTTCGTGCACACAGCCCAGCTTGGAGCGAACGACCTACACCGAACTGAGATACCTACAGCGTGA |
| | GCATTGAGAAAGCGCCACGCTTCCCGAAGGGAGAAAGGCGGACAGGTATCCGGTAAGCGGCAGGGTCGGAACAGGAGAGCGCACGAGGGAGCTTCCAG |
| | GGGGAAACGCCTGGTATCTTTATAGTCCTGTCGGGTTTCGCCACCTCTGACTTGAGCGTCGATTTTTGTGATGCTCGTCAGGGGGGCGGAGCCTATGG |
| | AAAAACGCCAGCAACGCGGCCTTTTTACGGTTCCTGGCCTTTTGCTGGCCTTTTGCTCACATGTTCTTTCCTGCGTTATCCCCTGATTCTGTGGATAA |
| | CCGTATTACCGCCTTTGAGTGAGCTGATACCGCTCGCCGCAGCCGAACGACCGAGCGCAGCGAGTCAGTGAGCGAGGAAGCGGAAGAGCGCCTGATGC |
| | GGTATTTTCTCCTTACGCATCTGTGCGGTATTTCACACCGCAGACCAGCCGCGTAACCTGGCAAAATCGGTTACGGTTGAGTAATAAATGGATGCCCT |
| | GCGTAAGCGGGTGTGGGCGGACAATAAAGTCTTAAACTGAACAAAATAGATCTAAACTATGACAATAAAGTCTTAAACTAGACAGAATAGTTGTAAAC |
| | TGAAATCAGTCCAGTTATGCTGTGAAAAAGCATACTGGACTTTTGTTATGGCTAAAGCAAACTCTTCATTTTCTGAAGTGCAAATTGCCCGTCGTATT |
| | AAAGAGGGGCGTGGCCAAGGGCATGGTAAAGACTATATTCGCGGCGTTGTGACAATTTACCGAACAACTCCGCGGCCGGGAAGCCGATCTCGGCTTGA |
| | ACGAATTGTTAGGTGGCGGTACTTGGGTCGATATCAAAGTGCATCACTTCTTCCCGTATGCCCAACTTTGTATAGAGAGCCACTGCGGGATCGTCACC |
| | GTAATCTGCTTGCACGTAGATCACATAAGCACCAAGCGCGTTGGCCTCATGCTTGAGGAGATTGATGAGCGCGGTGGCAATGCCCTGCCTCCGGTGCT |
| | CGCCGGAGACTGCGAGATCATAGATATAGATCTCACTACGCGGCTGCTCAAACCTGGGCAGAACGTAAGCCGCGAGAGCGCCAACAACCGCTTCTTGG |
| | TCGAAGGCAGCAAGCGCGATGAATGTCTTACTACGGAGCAAGTTCCCGAGGTAATCGGAGTCCGGCTGATGTTGGGAGTAGGTGGCTACGTCTCCGAA |
| | CTCACGACCGAAAAGATCAAGAGCAGCCCGCATGGATTTGACTTGGTCAGGGCCGAGCCTACATGTGCGAATGATGCCCATACTTGAGCCACCTAACT |
| | TTGTTTTAGGGCGACTGCCCTGCTGCGTAACATCGTTGCTGCTGCGTAACATCGTTGCTGCTCCATAACATCAAACATCGACCCACGGCGTAACGCGC |
| | TTGCTGCTTGGATGCCCGAGGCATAGACTGTACAAAAAAACAGTCATAACAAGCCATGAAAACCGCCACTGCGCCGTTACCACCGCTGCGTTCGGTCA |
| | AGGTTCTGGACCAGTTGCGTGAGCGCATACGCTACTTGCATTACAGTTTACGAACCGAACAGGCTTATGTCAACTGGGTTCGTGCCTTCATCCGTTTC |
| | CACGGTGTGCGTCACCCGGCAACCTTGGGCAGCAGCGAAGTCGAGGCATTTCTGTCCTGGCTGGCGAACGAGCGCAAGGTTTCGGTCTCCACGCATCG |
| | TCAGGCATTGGCGGCCTTGCTGTTCTTCTACGGCAAGGTGCTGTGCACGGATCTGCCCTGGCTTCAGGAGATCGGAAGACCTCGGCCGTCGCGGCGCT |
| | TGCCGGTGGTGCTGACCCCGGATGAAGTGGTTCGCATCCTCGGTTTTCTGGAAGGCGAGCATCGTTTGTTCGCCCAGGACTCTAGCTATAGTTCTAGT |
| | GGTTGGCTACGTATACTCCGGAATATTAATAGATCATGGAGATAATTAAAATGATAACCATCTCGCAAATAAATAAGTATTTTACTGTTTTCGTAACA |
| | GTTTTGTAATAAAAAAACCTATAAATATTCCGGATTATTCATACCGTCCCACCATCGGGCGCGGATCTCGGTCCGAAACCATGTCGTACTACCATCAC |
| | CATCACCATCACGATTACGATATCCCAACGACCGAAAACCTGTATTTTCAGGGCGCCATGGGATCC |
| ceDNAFVIII- | GGCCGGCCCCTGCAGGCAGCTGCGCGCTCGCTCGCTCACTGAGGCCGCCCGGGCAAAGCCCGGGCGTCGGGCGACCTTTGGTCGCCCGGCCTCAGTGA |
| vector 24 | GCGAGCGAGCGCGCAGAGAGGGAGTGGCCAACTCCATCACTAGGGGTTCCTTGTAGTTAATGATTAACCCGCCATGCTACTTATCTACGTAGCCATGC |
| (SEQ ID NO: | TCTAGACGGGGGAGGCTGCTGGTGAATATTAACCAAGGTCACCCCAGTTATCGGAGGAGCAAACAGGGGCTAAGTCCACACGCGTGGTACCGTCTGTC |
| 215) | TGCACATTTCGTAGAGCGAGTGTTCCGATACTCTAATCTCCCTAGGCAAGGTTCATATTTGTGTAGGTTACTTATTCTCCTTTTGTTGACTAAGTCAA |
| | TAATCAGAATCAGCAGGTTTGGAGTCAGCTTGGCAGGGATCAGCAGCCTGGGTTGGAAGGAGGGGGTATAAAAGCCCCTTCACCAGGAGAAGCCGTCA |
| | CACAGATCCACAAGCTCCTGAAGAGGTAAGGGTTTAAGGGATGGTTGGTTGGTGGGGTATTAATGTTTAATTACCTGGAGCACCTGCCTGAAATCACT |
| | TTTTTTCAGGTTGGTTTAAACGCCGCCACCATGCAAATAGAGCTCTCCACCTGCTTCTTTCTGTGCCTTTTGCGATTCTGCTTTAGTGCCACCAGAAG |
| | ATACTACCTGGGTGCAGTGGAACTGTCATGGGACTATATGCAAAGTGATCTCGGTGAGCTGCCTGTGGACGCAAGATTTCCTCCTAGAGTGCCAAAAT |
| | CTTTTCCATTCAACACCTCAGTCGTGTACAAAAAGACTCTGTTTGTAGAATTCACGGATCACCTTTTCAACATCGCTAAGCCAAGGCCACCCTGGATG |
| | GGTCTGCTAGGTCCTACCATCCAGGCTGAGGTTTATGATACAGTGGTCATTACACTTAAGAACATGGCTTCCCATCCTGTCAGTCTTCATGCTGTTGG |
| | TGTATCCTACTGGAAAGCTTCTGAGGGAGCTGAATATGATGATCAGACCAGTCAAAGGGAGAAAGAAGATGATAAAGTCTTCCCTGGTGGAAGCCATA |
| | CATATGTCTGGCAGGTCCTGAAAGAGAATGGTCCAATGGCCTCTGACCCACTGTGCCTTACCTACTCATATCTTTCTCATGTGGACCTGGTAAAAGAC |
| | TTGAATTCAGGCCTCATTGGAGCCCTACTAGTATGTAGAGAAGGGAGTCTGGCCAAGGAAAAGACACAGACCTTGCACAAATTTATACTACTTTTTGC |
| | TGTATTTGATGAAGGGAAAAGTTGGCACTCAGAAACAAAGAACTCCTTGATGCAGGATAGGGATGCTGCATCTGCTCGGGCCTGGCCTAAAATGCACA |
| | CAGTCAATGGTTATGTAAACAGGTCTCTGCCAGGTCTGATTGGATGCCACAGGAAATCAGTCTATTGGCATGTGATTGGAATGGGCACCACTCCTGAA |
| | GTGCACTCAATATTCCTCGAAGGTCACACATTTCTTGTGAGGAACCATCGCCAGGCGTCCTTGGAAATCTCGCCAATAACTTTCCTTACTGCTCAAAC |
| | ACTCTTGATGGACCTTGGACAGTTTCTACTGTTTTGTCATATCTCTTCCCACCAACATGATGGCATGGAAGCTTATGTCAAAGTAGACAGCTGTCCAG |
| | AGGAACCCCAACTACGAATGAAAAATAATGAAGAAGCGGAAGACTATGATGATGATCTTACTGATTCTGAAATGGATGTGGTCAGGTTTGATGATGAC |
| | AACTCTCCTTCCTTTATCCAAATTCGCTCAGTTGCCAAGAAGCATCCTAAAACTTGGGTACATTACATTGCTGCTGAAGAGGAGGACTGGGACTATGC |
| | TCCCTTAGTCCTCGCCCCCGATGACAGAAGTTATAAAAGTCAATATTTGAACAATGGCCCTCAGCGGATTGGTAGGAAGTACAAAAAAGTCCGATTTA |
| | TGGCATACACAGATGAAACCTTTAAGACTCGTGAAGCTATTCAGCATGAATCAGGAATCTTGGGACCTTTACTTTATGGGGAAGTTGGAGACACACTG |
| | TTGATTATATTTAAGAATCAAGCAAGCAGACCATATAACATCTACCCTCACGGAATCACTGATGTCCGTCCTTTGTATTCAAGGAGATTACCAAAAGG |
| | TGTAAAACATTTGAAGGATTTTCCAATTCTGCCAGGAGAAATATTCAAATATAAATGGACAGTGACTGTAGAAGATGGGCCAACTAAATCAGATCCTC |
| | GGTGCCTGACCCGCTATTACTCTAGTTTCGTTAATATGGAGAGAGATCTAGCTTCAGGACTCATTGGCCCTCTCCTCATCTGCTACAAAGAATCTGTA |
| | GATCAAAGAGGAAACCAGATAATGTCAGACAAGAGGAATGTCATCCTGTTTTCTGTATTTGATGAGAACCGAAGCTGGTACCTCACAGAGAATATACA |
| | ACGCTTTCTCCCCAATCCAGCTGGAGTGCAGCTTGAGGATCCAGAGTTCCAAGCCTCCAACATCATGCACAGCATCAATGGCTATGTTTTTGATAGTT |
| | TGCAGTTGTCAGTTTGTTTGCATGAGGTGGCATACTGGTACATTCTAAGCATTGGAGCACAGACTGACTTCCTTTCTGTCTTCTTCTCTGGATATACC |
| | TTCAAACACAAAATGGTCTATGAAGACACACTCACCCTATTCCCATTCTCAGGAGAAACTGTCTTCATGTCGATGGAAAACCCAGGTCTATGGATTCT |
| | GGGGTGCCACAACTCAGACTTTCGGAACAGAGGCATGACCGCCTTACTGAAGGTTTCTAGTTGTGACAAGAACACTGGTGATTATTACGAGGACAGTT |
| | ATGAAGATATTTCAGCATACTTGCTGAGTAAAAACAATGCCATTGAACCAAGAAGCTTCTCCCAGAATTCAAGACACCCTAGCACTAGGCAAAAGCAA |
| | TTTAATGCCACCACAATTCCAGAAAATGACATAGAGAAGACTGACCCTTGGTTTGCACACAGAACACCTATGCCTAAAATACAAAATGTCTCCTCTAG |
| | TGATTTGTTGATGCTCTTGCGACAGAGTCCTACTCCACATGGGCTATCCTTATCTGATCTCCAAGAAGCCAAATATGAGACTTTTTCTGATGATCCAT |
| | CACCTGGAGCAATAGACAGTAATAACAGCCTGTCTGAAATGACACACTTCAGGCCACAGCTCCATCACAGTGGGGACATGGTATTTACCCCTGAGTCA |
| | GGCCTCCAATTAAGATTAAATGAGAAACTGGGGACAACTGCAGCAACAGAGTTGAAGAAACTTGATTTCAAAGTTTCTAGTACATCAAATAATCTGAT |
| | TTCAACAATTCCATCAGACAATTTGGCAGCAGGTACTGATAATACAAGTTCCTTAGGACCCCCAAGTATGCCAGTTCATTATGATAGTCAATTAGATA |
| | CCACTCTATTTGGCAAAAAGTCATCTCCCCTTACTGAGTCTGGTGGACCTCTGAGCTTGAGTGAAGAAAATAATGATTCAAAGTTGTTAGAATCAGGT |
| | TTAATGAATAGCCAAGAAAGTTCATGGGGAAAAAATGTATCGTCAACAGAGAGTGGTAGGTTATTTAAAGGGAAAAGAGCTCATGGACCTGCTTTGTT |
| | GACTAAAGATAATGCCTTATTCAAAGTTAGCATCTCTTTGTTAAAGACAAACAAAACTTCCAATAATTCAGCAACTAATAGAAAGACTCACATTGATG |
| | GCCCATCATTATTAATTGAGAATAGTCCATCAGTCTGGCAAAATATATTAGAAAGTGACACTGAGTTTAAAAAAGTGACACCTTTGATTCATGACAGA |
| | ATGCTTATGGACAAAAATGCTACAGCTTTGAGGCTAAATCATATGTCAAATAAAACTACTTCATCAAAAAACATGGAAATGGTCCAACAGAAAAAAGA |
| | GGGCCCCATTCCACCAGATGCACAAAATCCAGATATGTCGTTCTTTAAGATGCTATTCTTGCCAGAATCAGCAAGGTGGATACAAAGGACTCATGGAA |
| | AGAACTCTCTGAACTCTGGGCAAGGCCCCAGTCCAAAGCAATTAGTATCCTTAGGACCAGAAAAATCTGTGGAAGGTCAGAATTTCTTGTCTGAGAAA |
| | AACAAAGTGGTAGTAGGAAAGGGTGAATTTACAAAGGACGTAGGACTCAAAGAGATGGTTTTTCCAAGCAGCAGAAACCTATTTCTTACTAACTTGGA |
| | TAATTTACATGAAAATAATACACACAATCAAGAAAAAAAAATTCAGGAAGAAATAGAAAAGAAGGAAACATTAATCCAAGAGAATGTAGTTTTGCCTC |
| | AGATACATACAGTGACTGGCACTAAGAATTTCATGAAGAACCTTTTCTTACTGAGCACTAGGCAAAATGTAGAAGGTTCATATGACGGGGCATATGCT |
| | CCAGTACTTCAAGATTTTAGGTCATTAAATGATTCAACAAATAGAACAAAGAAACACACAGCTCATTTCTCAAAAAAAGGGGAGGAAGAAAACTTGGA |
| | AGGCTTGGGAAATCAAACCAAGCAAATTGTAGAGAAATATGCATGCACCACAAGGATATCTCCTAATACAAGCCAGCAGAATTTTGTCACGCAACGTA |
| | GTAAGAGAGCTTTGAAACAATTCAGACTCCCACTAGAAGAAACAGAACTTGAAAAAAGGATAATTGTGGATGACACCTCAACCCAGTGGTCCAAAAAC |
| | ATGAAACATTTGACCCCGAGCACCCTCACACAGATAGACTACAATGAGAAGGAGAAAGGGGCCATTACTCAGTCTCCCTTATCAGATTGCCTTACGAG |
| | GAGTCATAGCATCCCTCAAGCAAATAGATCTCCATTACCCATTGCAAAGGTATCATCATTTCCATCTATTAGACCTATATATCTGACCAGGGTCCTAT |
| | TCCAAGACAACTCTTCTCATCTTCCAGCAGCATCTTATAGAAAGAAAGATTCTGGGGTCCAAGAAAGCAGTCATTTCTTACAAGGAGCCAAAAAAAAT |
| | AACCTTTCTTTAGCCATTCTAACCTTGGAGATGACTGGTGATCAAAGAGAGGTTGGCTCCCTGGGGACAAGTGCCACAAATTCAGTCACATACAAGAA |
| | AGTTGAGAACACTGTTCTCCCGAAACCAGACTTGCCCAAAACATCTGGCAAAGTTGAATTGCTTCCAAAAGTTCACATTTATCAGAAGGACCTATTCC |
| | CTACGGAAACTAGCAATGGGTCTCCTGGCCATCTGGATCTCGTGGAAGGGAGCCTTCTTCAGGGAACAGAGGGAGCGATTAAGTGGAATGAAGCAAAC |
| | AGACCTGGAAAAGTTCCCTTTCTGAGAGTAGCAACAGAAAGCTCTGCAAAGACTCCCTCCAAGCTATTGGATCCTCTTGCTTGGGATAACCACTATGG |
| | TACTCAGATACCAAAAGAAGAGTGGAAATCCCAAGAGAAGTCACCAGAAAAAACAGCTTTTAAGAAAAAGGATACCATTTTGTCCCTGAACGCTTGTG |
| | AAAGCAATCATGCAATAGCAGCAATAAATGAGGGACAAAATAAGCCCGAAATAGAAGTCACCTGGGCAAAGCAAGGTAGGACTGAAAGGCTGTGCTCT |
| | CAAAACCCACCAGTCTTGAAACGCCATCAACGGGAAATAACTCGTACTACTCTTCAGTCAGATCAAGAGGAAATTGACTATGATGATACCATATCAGT |
| | TGAAATGAAGAAGGAAGATTTTGACATTTATGATGAGGATGAAAATCAGAGCCCCCGCAGCTTTCAAAAGAAAACACGACACTATTTTATTGCTGCAG |
| | TGGAGAGGCTCTGGGATTATGGGATGAGTAGCTCCCCACATGTTCTAAGAAACAGGGCTCAGAGTGGCAGTGTCCCTCAGTTCAAGAAAGTTGTTTTC |
| | CAGGAATTTACTGATGGCTCCTTTACTCAGCCCTTATACCGTGGAGAACTAAATGAACATTTGGGACTCCTGGGGCCATATATAAGAGCAGAAGTTGA |
| | AGATAATATCATGGTAACTTTCAGAAATCAGGCCTCTCGTCCCTATTCCTTCTATTCTAGCCTTATTTCTTATGAGGAAGATCAGAGGCAAGGAGCAG |
| | AACCTAGAAAAAACTTTGTCAAGCCTAATGAAACCAAAACTTACTTTTGGAAAGTGCAACATCATATGGCACCCACTAAAGATGAGTTTGACTGCAAA |
| | GCCTGGGCTTATTTCTCTGATGTTGACCTGGAAAAAGATGTGCACTCAGGCCTGATTGGACCCCTTCTGGTCTGCCACACTAACACACTGAACCCTGC |
| | TCATGGGAGACAAGTGACAGTACAGGAATTTGCTCTGTTTTTCACCATCTTTGATGAGACCAAAAGCTGGTACTTCACTGAAAATATGGAAAGAAACT |
| | GCAGGGCTCCCTGCAATATCCAGATGGAAGATCCCACTTTTAAAGAGAATTATCGCTTCCATGCAATCAATGGCTACATAATGGATACACTACCTGGC |
| | TTAGTAATGGCTCAGGATCAAAGGATTCGATGGTATCTGCTCAGCATGGGCAGCAATGAAAACATCCATTCTATTCATTTCAGTGGACATGTGTTCAC |
| | TGTACGAAAAAAAGAGGAGTATAAAATGGCACTGTACAATCTCTATCCAGGTGTTTTTGAGACAGTGGAAATGTTACCATCCAAAGCTGGAATTTGGC |
| | GGGTGGAATGCCTTATTGGCGAGCATCTACATGCTGGGATGAGCACACTTTTTCTGGTGTACAGCAATAAGTGTCAGACTCCCCTGGGAATGGCTTCT |
| | GGACACATTAGAGATTTTCAGATTACAGCTTCAGGACAATATGGACAGTGGGCCCCAAAGCTGGCCAGACTTCATTATTCCGGATCAATCAATGCCTG |
| | GAGCACCAAGGAGCCCTTTTCTTGGATCAAGGTGGATCTGTTGGCACCAATGATTATTCACGGCATCAAGACCCAGGGTGCCCGTCAGAAGTTCTCCA |
| | GCCTCTACATCTCTCAGTTTATCATCATGTATAGTCTTGATGGGAAGAAGTGGCAGACTTATCGAGGAAATTCCACTGGAACCTTAATGGTCTTCTTT |
| | GGCAATGTGGATTCATCTGGGATAAAACACAATATTTTTAACCCTCCAATTATTGCTCGATACATCCGTTTGCACCCAACTCATTATAGCATTCGCAG |
| | CACTCTTCGCATGGAGTTGATGGGCTGTGATTTAAATAGTTGCAGCATGCCATTGGGAATGGAGAGTAAAGCAATATCAGATGCACAGATTACTGCTT |
| | CATCCTACTTTACCAATATGTTTGCCACCTGGTCTCCTTCAAAAGCTCGACTTCACCTCCAAGGGAGGAGTAATGCCTGGAGACCTCAGGTGAATAAT |
| | CCAAAAGAGTGGCTGCAAGTGGACTTCCAGAAGACAATGAAAGTCACAGGAGTAACTACTCAGGGAGTAAAATCTCTGCTTACCAGCATGTATGTGAA |
| | GGAGTTCCTCATCTCCAGCAGTCAAGATGGCCATCAGTGGACTCTCTTTTTTCAGAATGGCAAAGTAAAGGTTTTTCAGGGAAATCAAGACTCCTTCA |
| | CACCTGTGGTGAACTCTCTAGACCCACCGTTACTGACTCGCTACCTTCGAATTCACCCCCAGAGTTGGGTGCACCAGATTGCCCTGAGGATGGAGGTT |
| | CTGGGCTGCGAGGCACAGGACCTCTACTGATTAATTAAGAGCATCTTACCGCCATTTATTCCCATATTTGTTCTGTTTTTCTTGATTTGGGTATACAT |
| | TTAAATGTTAATAAAACAAAATGGTGGGGCAATCATTTACATTTTTAGGGATATGTAATTACTAGTTCAGGTGTATTGCCACAAGACAAACATGTTAA |
| | GAAACTTTCCCGTTATTTACGCTCTGTTCCTGTTAATCAACCTCTGGATTACAAAATTTGTGAAAGATTGACTGATATTCTTAACTATGTTGCTCCTT |
| | TTACGCTGTGTGGATATGCTGCTTTATAGCCTCTGTATCTAGCTATTGCTTCCCGTACGGCTTTCGTTTTCTCCTCCTTGTATAAATCCTGGTTGCTG |
| | TCTCTTTTAGAGGAGTTGTGGCCCGTTGTCCGTCAACGTGGCGTGGTGTGCTCTGTGTTTGCTGACGCAACCCCCACTGGCTGGGGCATTGCCACCAC |
| | CTGTCAACTCCTTTCTGGGACTTTCGCTTTCCCCCTCCCGATCGCCACGGCAGAACTCATCGCCGCCTGCCTTGCCCGCTGCTGGACAGGGGCTAGGT |
| | TGCTGGGCACTGATAATTCCGTGGTGTTGTCTGTGCCTTCTAGTTGCCAGCCATCTGTTGTTTGCCCCTCCCCCGTGCCTTCCTTGACCCTGGAAGGT |
| | GCCACTCCCACTGTCCTTTCCTAATAAAATGAGGAAATTGCATCGCATTGTCTGAGTAGGTGTCATTCTATTCTGGGGGGTGGGGTGGGGCAGGACAG |
| | CAAGGGGGAGGATTGGGAAGACAATAGCAGGCATGCTGGGGATGCGGTGGGCTCTATGGCTCTAGAGCATGGCTACGTAGATAAGTAGCATGGCGGGT |
| | TAATCATTAACTACACCTGCAGGAGGAACCCCTAGTGATGGAGTTGGCCACTCCCTCTCTGCGCGCTCGCTCGCTCACTGAGGCCGGGCGACCAAAGG |
| | TCGCCCGACGCCCGGGCGGCCTCAGTGAGCGAGCGAGCGCGCAGCTGCCTGCAGGGGCGCGCCTCGAGGCATGCGGTACCAAGCTTGTCGAGAAGTAC |
| | TAGAGGATCATAATCAGCCATACCACATTTGTAGAGGTTTTACTTGCTTTAAAAAACCTCCCACACCTCCCCCTGAACCTGAAACATAAAATGAATGC |
| | AATTGTTGTTGTTAACTTGTTTATTGCAGCTTATAATGGTTACAAATAAAGCAATAGCATCACAAATTTCACAAATAAAGCATTTTTTTCACTGCATT |
| | CTAGTTGTGGTTTGTCCAAACTCATCAATGTATCTTATCATGTCTGGATCTGATCACTGATATCGCCTAGGAGATCCGAACCAGATAAGTGAAATCTA |
| | GTTCCAAACTATTTTGTCATTTTTAATTTTCGTATTAGCTTACGACGCTACACCCAGTTCCCATCTATTTTGTCACTCTTCCCTAAATAATCCTTAAA |
| | AACTCCATTTCCACCCCTCCCAGTTCCCAACTATTTTGTCCGCCCACAGCGGGGCATTTTTCTTCCTGTTATGTTTTTAATCAAACATCCTGCCAACT |
| | CCATGTGACAAACCGTCATCTTCGGCTACTTTTTCTCTGTCACAGAATGAAAATTTTTCTGTCATCTCTTCGTTATTAATGTTTGTAATTGACTGAAT |
| | ATCAACGCTTATTTGCAGCCTGAATGGCGAATGGGACGCGCCCTGTAGCGGCGCATTAAGCGCGGCGGGTGTGGTGGTTACGCGCAGCGTGACCGCTA |
| | CACTTGCCAGCGCCCTAGCGCCCGCTCCTTTCGCTTTCTTCCCTTCCTTTCTCGCCACGTTCGCCGGCTTTCCCCGTCAAGCTCTAAATCGGGGGCTC |
| | CCTTTAGGGTTCCGATTTAGTGCTTTACGGCACCTCGACCCCAAAAAACTTGATTAGGGTGATGGTTCACGTAGTGGGCCATCGCCCTGATAGACGGT |
| | TTTTCGCCCTTTGACGTTGGAGTCCACGTTCTTTAATAGTGGACTCTTGTTCCAAACTGGAACAACACTCAACCCTATCTCGGTCTATTCTTTTGATT |
| | TATAAGGGATTTTGCCGATTTCGGCCTATTGGTTAAAAAATGAGCTGATTTAACAAAAATTTAACGCGAATTTTAACAAAATATTAACGTTTACAATT |
| | TCAGGTGGCACTTTTCGGGGAAATGTGCGCGGAACCCCTATTTGTTTATTTTTCTAAATACATTCAAATATGTATCCGCTCATGAGACAATAACCCTG |
| | ATAAATGCTTCAATAATATTGAAAAAGGAAGAGTATGAGTATTCAACATTTCCGTGTCGCCCTTATTCCCTTTTTTGCGGCATTTTGCCTTCCTGTTT |
| | TTGCTCACCCAGAAACGCTGGTGAAAGTAAAAGATGCTGAAGATCAGTTGGGTGCACGAGTGGGTTACATCGAACTGGATCTCAACAGCGGTAAGATC |
| | CTTGAGAGTTTTCGCCCCGAAGAACGTTTTCCAATGATGAGCACTTTTAAAGTTCTGCTATGTGGCGCGGTATTATCCCGTATTGACGCCGGGCAAGA |
| | GCAACTCGGTCGCCGCATACACTATTCTCAGAATGACTTGGTTGAGTACTCACCAGTCACAGAAAAGCATCTTACGGATGGCATGACAGTAAGAGAAT |
| | TATGCAGTGCTGCCATAACCATGAGTGATAACACTGCGGCCAACTTACTTCTGACAACGATCGGAGGACCGAAGGAGCTAACCGCTTTTTTGCACAAC |
| | ATGGGGGATCATGTAACTCGCCTTGATCGTTGGGAACCGGAGCTGAATGAAGCCATACCAAACGACGAGCGTGACACCACGATGCCTGTAGCAATGGC |
| | AACAACGTTGCGCAAACTATTAACTGGCGAACTACTTACTCTAGCTTCCCGGCAACAATTAATAGACTGGATGGAGGCGGATAAAGTTGCAGGACCAC |
| | TTCTGCGCTCGGCCCTTCCGGCTGGCTGGTTTATTGCTGATAAATCTGGAGCCGGTGAGCGTGGGTCTCGCGGTATCATTGCAGCACTGGGGCCAGAT |
| | GGTAAGCCCTCCCGTATCGTAGTTATCTACACGACGGGGAGTCAGGCAACTATGGATGAACGAAATAGACAGATCGCTGAGATAGGTGCCTCACTGAT |
| | TAAGCATTGGTAACTGTCAGACCAAGTTTACTCATATATACTTTAGATTGATTTAAAACTTCATTTTTAATTTAAAAGGATCTAGGTGAAGATCCTTT |
| | TTGATAATCTCATGACCAAAATCCCTTAACGTGAGTTTTCGTTCCACTGAGCGTCAGACCCCGTAGAAAAGATCAAAGGATCTTCTTGAGATCCTTTT |
| | TTTCTGCGCGTAATCTGCTGCTTGCAAACAAAAAAACCACCGCTACCAGCGGTGGTTTGTTTGCCGGATCAAGAGCTACCAACTCTTTTTCCGAAGGT |
| | AACTGGCTTCAGCAGAGCGCAGATACCAAATACTGTCCTTCTAGTGTAGCCGTAGTTAGGCCACCACTTCAAGAACTCTGTAGCACCGCCTACATACC |
| | TCGCTCTGCTAATCCTGTTACCAGTGGCTGCTGCCAGTGGCGATAAGTCGTGTCTTACCGGGTTGGACTCAAGACGATAGTTACCGGATAAGGCGCAG |
| | CGGTCGGGCTGAACGGGGGGTTCGTGCACACAGCCCAGCTTGGAGCGAACGACCTACACCGAACTGAGATACCTACAGCGTGAGCATTGAGAAAGCGC |
| | CACGCTTCCCGAAGGGAGAAAGGCGGACAGGTATCCGGTAAGCGGCAGGGTCGGAACAGGAGAGCGCACGAGGGAGCTTCCAGGGGGAAACGCCTGGT |
| | ATCTTTATAGTCCTGTCGGGTTTCGCCACCTCTGACTTGAGCGTCGATTTTTGTGATGCTCGTCAGGGGGGCGGAGCCTATGGAAAAACGCCAGCAAC |
| | GCGGCCTTTTTACGGTTCCTGGCCTTTTGCTGGCCTTTTGCTCACATGTTCTTTCCTGCGTTATCCCCTGATTCTGTGGATAACCGTATTACCGCCTT |
| | TGAGTGAGCTGATACCGCTCGCCGCAGCCGAACGACCGAGCGCAGCGAGTCAGTGAGCGAGGAAGCGGAAGAGCGCCTGATGCGGTATTTTCTCCTTA |
| | CGCATCTGTGCGGTATTTCACACCGCAGACCAGCCGCGTAACCTGGCAAAATCGGTTACGGTTGAGTAATAAATGGATGCCCTGCGTAAGCGGGTGTG |
| | GGCGGACAATAAAGTCTTAAACTGAACAAAATAGATCTAAACTATGACAATAAAGTCTTAAACTAGACAGAATAGTTGTAAACTGAAATCAGTCCAGT |
| | TATGCTGTGAAAAAGCATACTGGACTTTTGTTATGGCTAAAGCAAACTCTTCATTTTCTGAAGTGCAAATTGCCCGTCGTATTAAAGAGGGGCGTGGC |
| | CAAGGGCATGGTAAAGACTATATTCGCGGCGTTGTGACAATTTACCGAACAACTCCGCGGCCGGGAAGCCGATCTCGGCTTGAACGAATTGTTAGGTG |
| | GCGGTACTTGGGTCGATATCAAAGTGCATCACTTCTTCCCGTATGCCCAACTTTGTATAGAGAGCCACTGCGGGATCGTCACCGTAATCTGCTTGCAC |
| | GTAGATCACATAAGCACCAAGCGCGTTGGCCTCATGCTTGAGGAGATTGATGAGCGCGGTGGCAATGCCCTGCCTCCGGTGCTCGCCGGAGACTGCGA |
| | GATCATAGATATAGATCTCACTACGCGGCTGCTCAAACCTGGGCAGAACGTAAGCCGCGAGAGCGCCAACAACCGCTTCTTGGTCGAAGGCAGCAAGC |
| | GCGATGAATGTCTTACTACGGAGCAAGTTCCCGAGGTAATCGGAGTCCGGCTGATGTTGGGAGTAGGTGGCTACGTCTCCGAACTCACGACCGAAAAG |
| | ATCAAGAGCAGCCCGCATGGATTTGACTTGGTCAGGGCCGAGCCTACATGTGCGAATGATGCCCATACTTGAGCCACCTAACTTTGTTTTAGGGCGAC |
| | TGCCCTGCTGCGTAACATCGTTGCTGCTGCGTAACATCGTTGCTGCTCCATAACATCAAACATCGACCCACGGCGTAACGCGCTTGCTGCTTGGATGC |
| | CCGAGGCATAGACTGTACAAAAAAACAGTCATAACAAGCCATGAAAACCGCCACTGCGCCGTTACCACCGCTGCGTTCGGTCAAGGTTCTGGACCAGT |
| | TGCGTGAGCGCATACGCTACTTGCATTACAGTTTACGAACCGAACAGGCTTATGTCAACTGGGTTCGTGCCTTCATCCGTTTCCACGGTGTGCGTCAC |
| | CCGGCAACCTTGGGCAGCAGCGAAGTCGAGGCATTTCTGTCCTGGCTGGCGAACGAGCGCAAGGTTTCGGTCTCCACGCATCGTCAGGCATTGGCGGC |
| | CTTGCTGTTCTTCTACGGCAAGGTGCTGTGCACGGATCTGCCCTGGCTTCAGGAGATCGGAAGACCTCGGCCGTCGCGGCGCTTGCCGGTGGTGCTGA |
| | CCCCGGATGAAGTGGTTCGCATCCTCGGTTTTCTGGAAGGCGAGCATCGTTTGTTCGCCCAGGACTCTAGCTATAGTTCTAGTGGTTGGCTACGTATA |
| | CTCCGGAATATTAATAGATCATGGAGATAATTAAAATGATAACCATCTCGCAAATAAATAAGTATTTTACTGTTTTCGTAACAGTTTTGTAATAAAAA |
| | AACCTATAAATATTCCGGATTATTCATACCGTCCCACCATCGGGCGCGGATCTCGGTCCGAAACCATGTCGTACTACCATCACCATCACCATCACGAT |
| | TACGATATCCCAACGACCGAAAACCTGTATTTTCAGGGCGCCATGGGATCC |
| ceDNAFVIII- | AAAGTAGCCGAAGATGACGGTTTGTCACATGGAGTTGGCAGGATGTTTGATTAAAAACATAACAGGAAGAAAAATGCCCCGCTGTGGGCGGACAAAAT |
| vector 25 | AGTTGGGAACTGGGAGGGGTGGAAATGGAGTTTTTAAGGATTATTTAGGGAAGAGTGACAAAATAGATGGGAACTGGGTGTAGCGTCGTAAGCTAATA |
| (SEQ ID NO: | CGAAAATTAAAAATGACAAAATAGTTTGGAACTAGATTTCACTTATCTGGTTCGGATCTCCTAGGCTCAAGCAGTGATCAGATCCAGACATGATAAGA |
| 216) | TACATTGATGAGTTTGGACAAACCACAACTAGAATGCAGTGAAAAAAATGCTTTATTTGTGAAATTTGTGATGCTATTGCTTTATTTGTAACCATTAT |
| | AAGCTGCAATAAACAAGTTAACAACAACAATTGCATTCATTTTATGTTTCAGGTTCAGGGGGAGGTGTGGGAGGTTTTTTAAAGCAAGTAAAACCTCT |
| | ACAAATGTGGTATGGCTGATTATGATCCTCTAGTACTTCTCGACAAGCTTGTCGAGACTGCAGGCTCTAGAGGCCGGCCCCTGCAGGCAGCTGCGCGC |
| | TCGCTCGCTCACTGAGGCCGCCCGGGCAAAGCCCGGGCGTCGGGCGACCTTTGGTCGCCCGGCCTCAGTGAGCGAGCGAGCGCGCAGAGAGGGAGTGG |
| | CCAACTCCATCACTAGGGGTTCCTTGTAGTTAATGATTAACCCGCCATGCTACTTATCTACGTAGCCATGCATATGGAGTCAATGGGAAAAACCCATT |
| | GGAGCCAAGTACACTGACTCAATAGGGACTTTCCATTGGGTTTTGCCCAGTACATAAGGTCAATAGGGGGTGAGTCAACAGGAAAGTCCCATTGGAGC |
| | CAAGTACATTGAGTCAATAGGGACTTTCCAATGGGTTTTGCCCAGTACATAAGGTCAATGGGAGGTAAGCCAATGGGTTTTTCCCATTACTGACATGT |
| | ATACTGAGTCATTAGGGACTTTCCAATGGGTTTTGCCCAGTACATAAGGTCAATAGGGGTGAATCAACAGGAAAGTCCCATTGGAGCCAAGTACACTG |
| | AGTCAATAGGGACTTTCCATTGGGTTTTGCCCAGTACAAAAGGTCAATAGGGGGTGAGTCAATGGGTTTTTCCCATTATTGGCACATACATAAGGTCA |
| | ATAGGGGTGACTAGTGGAGAAGAGCATGCTTGAGGGCTGAGTGCCCCTCAGTGGGCAGAGAGCACATGGCCCACAGTCCCTGAGAAGTTGGGGGGAGG |
| | GGTGGGCAATTGAACTGGTGCCTAGAGAAGGTGGGGCTTGGGTAAACTGGGAAAGTGATGTGGTGTACTGGCTCCACCTTTTTCCCCAGGGTGGGGGA |
| | GAACCATATATAAGTGCAGTAGTCTCTGTGAACATTCAAGCTTCTGCCTTCTCCCTCCTGTGAGTTTGGTAAGTCACTGACTGTCTATGCCTGGGAAA |
| | GGGTGGGCAGGAGATGGGGCAGTGCAGGAAAAGTGGCACTATGAACCCTGCAGCCCTAGACAATTGTACTAACCTTCTTCTCTTTCCTCTCCTGACAG |
| | GTTGGTGTACAGTAGCTTCCGTTTAAACAGCCACCATGCAGATAGAATTATCTACTTGTTTTTTTCTTTGTCTGCTCAGGTTCTGCTTCTCTGCTACA |
| | AGGAGGTATTACTTAGGTGCTGTAGAGTTATCTTGGGACTACATGCAGTCTGATCTTGGGGAGCTCCCTGTGGATGCAAGATTTCCCCCTAGAGTACC |
| | TAAAAGTTTCCCTTTCAACACAAGTGTGGTGTATAAGAAGACTCTGTTTGTTGAGTTCACAGATCACCTTTTCAATATTGCCAAGCCCAGACCCCCCT |
| | GGATGGGTCTACTGGGGCCAACAATTCAAGCAGAGGTATATGATACAGTGGTGATCACATTAAAGAACATGGCATCCCACCCTGTAAGCCTGCATGCT |
| | GTTGGTGTGTCCTATTGGAAAGCAAGTGAAGGTGCTGAATATGATGATCAAACATCCCAAAGAGAGAAGGAAGATGACAAAGTCTTCCCAGGTGGCTC |
| | TCACACCTATGTGTGGCAAGTGCTCAAGGAAAATGGGCCTATGGCTAGTGATCCATTGTGCCTCACATATAGCTACCTGTCCCATGTGGACTTAGTTA |
| | AAGATCTGAACTCAGGTCTGATTGGTGCCCTGCTGGTCTGTAGGGAAGGATCACTAGCTAAAGAAAAAACCCAGACTTTACACAAGTTCATCTTATTA |
| | TTTGCTGTTTTTGATGAGGGAAAGAGCTGGCACTCAGAGACTAAGAATTCACTCATGCAGGATAGAGATGCAGCTTCTGCTAGAGCATGGCCAAAAAT |
| | GCATACTGTGAATGGGTATGTTAACAGGAGTCTGCCTGGCCTCATAGGCTGCCATAGAAAATCAGTGTACTGGCATGTCATAGGTATGGGCACTACTC |
| | CTGAGGTGCATTCCATTTTTTTGGAGGGGCATACTTTCCTTGTAAGAAACCACAGGCAGGCTTCATTGGAAATTAGTCCAATAACCTTTCTCACAGCC |
| | CAGACTCTGCTAATGGACTTGGGGCAGTTTTTATTATTTTGTCACATTAGCTCTCATCAGCATGATGGAATGGAAGCCTATGTTAAGGTTGATTCCTG |
| | CCCAGAAGAGCCCCAGTTGAGAATGAAGAACAATGAGGAAGCAGAAGACTATGATGATGATCTAACAGACTCAGAAATGGATGTTGTGAGATTTGATG |
| | ATGATAACTCCCCAAGTTTTATTCAGATCAGGTCAGTGGCCAAGAAACATCCAAAAACATGGGTTCATTATATTGCAGCAGAAGAAGAAGACTGGGAT |
| | TATGCACCCTTGGTATTAGCCCCTGATGACAGAAGCTATAAGTCACAATATCTCAACAATGGACCCCAGAGAATTGGCAGAAAGTACAAAAAAGTCAG |
| | GTTTATGGCTTATACTGATGAGACTTTCAAAACTAGAGAGGCTATTCAACATGAATCTGGCATCCTAGGTCCTTTGTTATATGGGGAAGTAGGGGACA |
| | CCTTATTAATTATATTTAAAAACCAGGCCAGTAGGCCTTACAACATTTACCCCCACGGTATAACAGATGTCAGACCACTGTACTCAAGGAGGCTACCA |
| | AAAGGGGTGAAGCACCTAAAAGACTTCCCCATCCTACCTGGTGAGATTTTCAAGTATAAGTGGACAGTGACTGTAGAAGATGGTCCAACCAAATCAGA |
| | TCCCAGATGCCTGACAAGGTACTACAGTAGCTTTGTAAATATGGAGAGAGACCTGGCCTCAGGGTTAATAGGGCCCCTACTGATCTGCTACAAGGAGA |
| | GTGTAGACCAAAGAGGCAACCAAATTATGTCAGACAAGAGAAATGTCATCCTCTTTAGTGTTTTTGATGAGAATAGGTCCTGGTACCTGACAGAAAAT |
| | ATCCAAAGATTCCTTCCAAATCCAGCAGGGGTACAACTGGAGGACCCTGAGTTCCAGGCCTCCAATATCATGCACAGCATCAATGGTTATGTGTTTGA |
| | CAGTTTGCAACTTTCAGTGTGCCTTCATGAGGTTGCATACTGGTATATACTTTCTATAGGGGCCCAGACAGACTTCTTGTCAGTTTTCTTTTCAGGCT |
| | ATACTTTCAAGCATAAGATGGTATATGAAGATACCCTGACTCTTTTTCCCTTTAGTGGTGAGACAGTTTTCATGTCAATGGAAAACCCAGGGCTTTGG |
| | ATCTTGGGATGCCACAACTCTGACTTTAGAAACAGAGGCATGACTGCCCTTTTAAAGGTGTCCTCTTGTGATAAGAATACTGGAGACTACTATGAGGA |
| | CAGCTATGAGGACATTTCAGCCTATCTGCTGTCAAAAAATAATGCTATAGAGCCAAGGTCATTTTCTCAAAATCCTCCTGTCCTGAAGAGGCACCAAA |
| | GAGAGATAACCAGGACTACCTTACAGTCTGACCAGGAGGAAATTGATTATGATGACACAATAAGTGTGGAGATGAAAAAGGAGGATTTTGATATTTAT |
| | GATGAGGATGAAAACCAATCTCCAAGATCTTTCCAGAAGAAGACTAGACACTATTTCATTGCTGCAGTGGAAAGACTGTGGGACTATGGAATGTCCTC |
| | CAGCCCTCATGTTCTCAGGAATAGGGCTCAAAGTGGTTCTGTGCCACAGTTCAAGAAGGTGGTGTTTCAGGAATTCACAGATGGGTCCTTTACTCAAC |
| | CACTGTATAGGGGAGAACTCAATGAACATCTAGGATTACTAGGTCCCTACATTAGAGCTGAGGTGGAGGACAATATCATGGTCACTTTCAGGAACCAG |
| | GCATCTAGACCATACTCTTTTTACAGCTCCTTGATATCTTATGAAGAGGACCAGAGACAGGGTGCAGAACCCAGGAAGAACTTTGTGAAACCCAATGA |
| | GACCAAAACATACTTCTGGAAGGTCCAGCATCATATGGCTCCTACCAAGGATGAATTTGACTGCAAAGCCTGGGCTTACTTCTCAGATGTGGATTTGG |
| | AGAAAGATGTGCACAGTGGCTTGATTGGGCCTCTTTTGGTATGTCATACCAACACCTTAAACCCTGCTCATGGAAGACAAGTAACAGTGCAAGAGTTT |
| | GCCCTCTTTTTCACTATATTTGATGAGACAAAAAGTTGGTACTTTACTGAGAATATGGAGAGGAACTGCAGGGCTCCCTGCAATATACAGATGGAGGA |
| | TCCTACTTTCAAGGAAAACTATAGGTTTCATGCCATTAATGGCTATATCATGGATACATTGCCTGGCTTAGTTATGGCCCAGGATCAGAGAATCAGAT |
| | GGTACCTCCTTAGTATGGGAAGCAATGAAAACATACATTCTATTCACTTCAGTGGACATGTCTTTACTGTGAGAAAAAAGGAAGAGTACAAGATGGCA |
| | CTGTACAATCTGTACCCTGGAGTGTTTGAGACAGTTGAGATGCTGCCCAGCAAGGCTGGGATCTGGAGGGTAGAATGCCTGATTGGAGAACACTTACA |
| | TGCAGGTATGTCCACTCTATTCTTGGTCTATTCCAACAAGTGTCAGACCCCCCTAGGCATGGCATCTGGCCATATTAGAGATTTCCAGATAACTGCTT |
| | CTGGTCAGTATGGCCAGTGGGCCCCCAAGCTTGCTAGACTTCACTACAGTGGTTCAATAAATGCCTGGTCCACCAAGGAGCCCTTCAGCTGGATTAAA |
| | GTGGACTTGCTAGCCCCCATGATCATTCATGGGATAAAAACACAGGGTGCCAGACAGAAATTTTCATCTCTGTACATCAGCCAGTTTATCATCATGTA |
| | CAGTCTGGATGGCAAAAAATGGCAGACCTACAGAGGTAACTCTACAGGTACACTAATGGTATTTTTTGGCAATGTAGATTCATCAGGTATCAAGCATA |
| | ATATCTTTAATCCTCCCATTATTGCCAGATACATCAGGTTGCACCCAACTCATTACAGTATAAGATCCACTTTAAGGATGGAGCTTATGGGGTGTGAC |
| | CTTAATAGCTGCAGTATGCCCTTGGGAATGGAAAGTAAGGCCATATCAGATGCCCAGATTACTGCAAGCAGCTACTTTACAAACATGTTTGCAACCTG |
| | GTCTCCTAGTAAAGCCAGGCTGCACTTGCAGGGTAGGAGCAATGCATGGAGACCCCAGGTCAATAACCCAAAAGAGTGGCTTCAAGTTGACTTTCAAA |
| | AGACAATGAAGGTAACAGGGGTAACCACCCAAGGGGTAAAGAGTCTGCTGACATCTATGTATGTAAAAGAATTCCTCATCTCAAGTAGTCAAGATGGG |
| | CACCAGTGGACACTGTTCTTCCAGAATGGAAAAGTTAAGGTGTTCCAAGGTAATCAAGACAGCTTCACTCCAGTGGTGAACAGTCTGGATCCACCACT |
| | CCTAACCAGGTACCTGAGGATCCACCCTCAGTCCTGGGTCCACCAGATAGCTCTGAGAATGGAAGTGCTGGGCTGTGAAGCTCAGGACCTATACTGAT |
| | TAATTAATAAAATACAGCATAGCAAAACTTTAACCTCCAAATCAAGCCTCTACTTGAATCCTTTTCTGAGGGATGAATAAGGCATAGGCATCAGGGGC |
| | TGTTGCCAATGTGCATTAGCTGTTTGCAGCCTCACCTTCTTTCATGGAGTTTAAGATATAGTGTATTTTCCCAAGGTTTGAACTAGCTCTTCATTTCT |
| | TTATGTTTTAAATGCACTGACCTCCCACATTCCCTTTTTAGTAAAATATTCAGAAATAATTTAAATACATCATTGCAATGAAAATAAATGTTTTTTAT |
| | TAGGCAGAATCCAGATGCTCAAGGCCCTTCATAATATCCCCCAGTTTAGTAGTTGGACTTAGGGAACAAAGGAACCTTTAATAGAAATTGGACAGCAA |
| | GAAAGCGAGCTCCATAAAGTAGGAAACACTACACGATTCCATAAAGTAGGAAACACTACATCACTCCATAAAGTAGGAAACACTACACAGACATGATA |
| | AGATACATTGATGAGTTTGGACAAACCACAACTAGAATGCAGTGAAAAAAATGCTTTATTTGTGAAATTTGTGATGCTATTGCTTTATTTGTAACCAT |
| | TATAAGCTGCAATAAACAAGTTAACAACAACAATTGCATTCATTTTATGTTTCAGGTTCAGGGGGAGATGTGGGAGGTTTTTTAAAGCAAGTAAAACC |
| | TCTACAAATGTGGTACTTAAGCATGGCTACGTAGATAAGTAGCATGGCGGGTTAATCATTAACTACACCTGCAGGAGGAACCCCTAGTGATGGAGTTG |
| | GCCACTCCCTCTCTGCGCGCTCGCTCGCTCACTGAGGCCGGGCGACCAAAGGTCGCCCGACGCCCGGGCGGCCTCAGTGAGCGAGCGAGCGCGCAGCT |
| | GCCTGCAGGGGCGCGCCGCTAGCAGCTGATGCATAGCATGCGGTACCGGGAGATGGGGGAGGCTAACTGAAACACGGAAGGAGACAATACCGGAAGGA |
| | ACCCGCGCTATGACGGCAATAAAAAGACAGAATAAAACGCACGGGTGTTGGGTCGTTTGTTCATAAACGCGGGGTTCGGTCCCAGGGCTGGCACTCTG |
| | TCGATACCCCACCGAGACCCCATTGGGACCAATACGCCCGCGTTTCTTCCTTTTCCCCACCCCAACCCCCAAGTTCGGGTGAAGGCCCAGGGCTCGCA |
| | GCCAACGTCGGGGCGGCAAGCCCTGCCATAGCCACTACGGGTACGTAGGCCAACCACTAGAACTATAGCTAGAGTCCTGGGCGAACAAACGATGCTCG |
| | CCTTCCAGAAAACCGAGGATGCGAACCACTTCATCCGGGGTCAGCACCACCGGCAAGCGCCGCGACGGCCGAGGTCTACCGATCTCCTGAAGCCAGGG |
| | CAGATCCGTGCACAGCACCTTGCCGTAGAAGAACAGCAAGGCCGCCAATGCCTGACGATGCGTGGAGACCGAAACCTTGCGCTCGTTCGCCAGCCAGG |
| | ACAGAAATGCCTCGACTTCGCTGCTGCCCAAGGTTGCCGGGTGACGCACACCGTGGAAACGGATGAAGGCACGAACCCAGTTGACATAAGCCTGTTCG |
| | GTTCGTAAACTGTAATGCAAGTAGCGTATGCGCTCACGCAACTGGTCCAGAACCTTGACCGAACGCAGCGGTGGTAACGGCGCAGTGGCGGTTTTCAT |
| | GGCTTGTTATGACTGTTTTTTTGTACAGTCTATGCCTCGGGCATCCAAGCAGCAAGCGCGTTACGCCGTGGGTCGATGTTTGATGTTATGGAGCAGCA |
| | ACGATGTTACGCAGCAGCAACGATGTTACGCAGCAGGGCAGTCGCCCTAAAACAAAGTTAGGTGGCTCAAGTATGGGCATCATTCGCACATGTAGGCT |
| | CGGCCCTGACCAAGTCAAATCCATGCGGGCTGCTCTTGATCTTTTCGGTCGTGAGTTCGGAGACGTAGCCACCTACTCCCAACATCAGCCGGACTCCG |
| | ATTACCTCGGGAACTTGCTCCGTAGTAAGACATTCATCGCGCTTGCTGCCTTCGACCAAGAAGCGGTTGTTGGCGCTCTCGCGGCTTACGTTCTGCCC |
| | AGGTTTGAGCAGCCGCGTAGTGAGATCTATATCTATGATCTCGCAGTCTCCGGCGAGCACCGGAGGCAGGGCATTGCCACCGCGCTCATCAATCTCCT |
| | CAAGCATGAGGCCAACGCGCTTGGTGCTTATGTGATCTACGTGCAAGCAGATTACGGTGACGATCCCGCAGTGGCTCTCTATACAAAGTTGGGCATAC |
| | GGGAAGAAGTGATGCACTTTGATATCGACCCAAGTACCGCCACCTAACAATTCGTTCAAGCCGAGATCGGCTTCCCGGCCGCGGAGTTGTTCGGTAAA |
| | TTGTCACAACGCCGCGAATATAGTCTTTACCATGCCCTTGGCCACGCCCCTCTTTAATACGACGGGCAATTTGCACTTCAGAAAATGAAGAGTTTGCT |
| | TTAGCCATAACAAAAGTCCAGTATGCTTTTTCACAGCATAACTGGACTGATTTCAGTTTACAACTATTCTGTCTAGTTTAAGACTTTATTGTCATAGT |
| | TTAGATCTATTTTGTTCAGTTTAAGACTTTATTGTCCGCCCACACCCGCTTACGCAGGGCATCCATTTATTACTCAACCGTAACCGATTTTGCCAGGT |
| | TACGCGGCTGGTCTGCGGTGTGAAATACCGCACAGATGCGTAAGGAGAAAATACCGCATCAGGCGCTCTTCCGCTTCCTCGCTCACTGACTCGCTGCG |
| | CTCGGTCGTTCGGCTGCGGCGAGCGGTATCAGCTCACTCAAAGGCGGTAATACGGTTATCCACAGAATCAGGGGATAACGCAGGAAAGAACATGTGAG |
| | CAAAAGGCCAGCAAAAGGCCAGGAACCGTAAAAAGGCCGCGTTGCTGGCGTTTTTCCATAGGCTCCGCCCCCCTGACGAGCATCACAAAAATCGACGC |
| | TCAAGTCAGAGGTGGCGAAACCCGACAGGACTATAAAGATACCAGGCGTTTCCCCCTGGAAGCTCCCTCGTGCGCTCTCCTGTTCCGACCCTGCCGCT |
| | TACCGGATACCTGTCCGCCTTTCTCCCTTCGGGAAGCGTGGCGCTTTCTCAATGCTCACGCTGTAGGTATCTCAGTTCGGTGTAGGTCGTTCGCTCCA |
| | AGCTGGGCTGTGTGCACGAACCCCCCGTTCAGCCCGACCGCTGCGCCTTATCCGGTAACTATCGTCTTGAGTCCAACCCGGTAAGACACGACTTATCG |
| | CCACTGGCAGCAGCCACTGGTAACAGGATTAGCAGAGCGAGGTATGTAGGCGGTGCTACAGAGTTCTTGAAGTGGTGGCCTAACTACGGCTACACTAG |
| | AAGGACAGTATTTGGTATCTGCGCTCTGCTGAAGCCAGTTACCTTCGGAAAAAGAGTTGGTAGCTCTTGATCCGGCAAACAAACCACCGCTGGTAGCG |
| | GTGGTTTTTTTGTTTGCAAGCAGCAGATTACGCGCAGAAAAAAAGGATCTCAAGAAGATCCTTTGATCTTTTCTACGGGGTCTGACGCTCAGTGGAAC |
| | GAAAACTCACGTTAAGGGATTTTGGTCATGAGATTATCAAAAAGGATCTTCACCTAGATCCTTTTAAATTAAAAATGAAGTTTTAAATCAATCTAAAG |
| | TATATATGAGTAAACTTGGTCTGACAGTTACCAATGCTTAATCAGTGAGGCACCTATCTCAGCGATCTGTCTATTTCGTTCATCCATAGTTGCCTGAC |
| | TCCCCGTCGTGTAGATAACTACGATACGGGAGGGCTTACCATCTGGCCCCAGTGCTGCAATGATACCGCGAGACCCACGCTCACCGGCTCCAGATTTA |
| | TCAGCAATAAACCAGCCAGCCGGAAGGGCCGAGCGCAGAAGTGGTCCTGCAACTTTATCCGCCTCCATCCAGTCTATTAATTGTTGCCGGGAAGCTAG |
| | AGTAAGTAGTTCGCCAGTTAATAGTTTGCGCAACGTTGTTGCCATTGCTACAGGCATCGTGGTGTCACGCTCGTCGTTTGGTATGGCTTCATTCAGCT |
| | CCGGTTCCCAACGATCAAGGCGAGTTACATGATCCCCCATGTTGTGCAAAAAAGCGGTTAGCTCCTTCGGTCCTCCGATCGTTGTCAGAAGTAAGTTG |
| | GCCGCAGTGTTATCACTCATGGTTATGGCAGCACTGCATAATTCTCTTACTGTCATGCCATCCGTAAGATGCTTTTCTGTGACTGGTGAGTACTCAAC |
| | CAAGTCATTCTGAGAATAGTGTATGCGGCGACCGAGTTGCTCTTGCCCGGCGTCAATACGGGATAATACCGCGCCACATAGCAGAACTTTAAAAGTGC |
| | TCATCATTGGAAAACGTTCTTCGGGGCGAAAACTCTCAAGGATCTTACCGCTGTTGAGATCCAGTTCGATGTAACCCACTCGTGCACCCAACTGATCT |
| | TCAGCATCTTTTACTTTCACCAGCGTTTCTGGGTGAGCAAAAACAGGAAGGCAAAATGCCGCAAAAAAGGGAATAAGGGCGACACGGAAATGTTGAAT |
| | ACTCATACTCTTCCTTTTTCAATATTATTGAAGCATTTATCAGGGTTATTGTCTCATGAGCGGATACATATTTGAATGTATTTAGAAAAATAAACAAA |
| | TAGGGGTTCCGCGCACATTTCCCCGAAAAGTGCCACCTGAAATTGTAAACGTTAATATTTTGTTAAAATTCGCGTTAAATTTTTGTTAAATCAGCTCA |
| | TTTTTTAACCAATAGGCCGAAATCGGCAAAATCCCTTATAAATCAAAAGAATAGACCGAGATAGGGTTGAGTGTTGTTCCAGTTTGGAACAAGAGTCC |
| | ACTATTAAAGAACGTGGACTCCAACGTCAAAGGGCGAAAAACCGTCTATCAGGGCGATGGCCCACTACGTGAACCATCACCCTAATCAAGTTTTTTGG |
| | GGTCGAGGTGCCGTAAAGCACTAAATCGGAACCCTAAAGGGAGCCCCCGATTTAGAGCTTGACGGGGAAAGCCGGCGAACGTGGCGAGAAAGGAAGGG |
| | AAGAAAGCGAAAGGAGCGGGCGCTAGGGCGCTGGCAAGTGTAGCGGTCACGCTGCGCGTAACCACCACACCCGCCGCGCTTAATGCGCCGCTACAGGG |
| | CGCGTCCCATTCGCCATTCAGGCTGCAAATAAGCGTTGATATTCAGTCAATTACAAACATTAATAACGAAGAGATGACAGAAAAATTTTCATTCTGTG |
| | ACAGAGAA |
| ceDNAFVIII- | AAAGTAGCCGAAGATGACGGTTTGTCACATGGAGTTGGCAGGATGTTTGATTAAAAACATAACAGGAAGAAAAATGCCCCGCTGTGGGCGGACAAAAT |
| vector 26 | AGTTGGGAACTGGGAGGGGTGGAAATGGAGTTTTTAAGGATTATTTAGGGAAGAGTGACAAAATAGATGGGAACTGGGTGTAGCGTCGTAAGCTAATA |
| (SEQ ID NO: | CGAAAATTAAAAATGACAAAATAGTTTGGAACTAGATTTCACTTATCTGGTTCGGATCTCCTAGGCTCAAGCAGTGATCAGATCCAGACATGATAAGA |
| 217) | TACATTGATGAGTTTGGACAAACCACAACTAGAATGCAGTGAAAAAAATGCTTTATTTGTGAAATTTGTGATGCTATTGCTTTATTTGTAACCATTAT |
| | AAGCTGCAATAAACAAGTTAACAACAACAATTGCATTCATTTTATGTTTCAGGTTCAGGGGGAGGTGTGGGAGGTTTTTTAAAGCAAGTAAAACCTCT |
| | ACAAATGTGGTATGGCTGATTATGATCCTCTAGTACTTCTCGACAAGCTTGTCGAGACTGCAGGCTCTAGAGGCCGGCCCCTGCAGGCAGCTGCGCGC |
| | TCGCTCGCTCACTGAGGCCGCCCGGGCAAAGCCCGGGCGTCGGGCGACCTTTGGTCGCCCGGCCTCAGTGAGCGAGCGAGCGCGCAGAGAGGGAGTGG |
| | CCAACTCCATCACTAGGGGTTCCTTGTAGTTAATGATTAACCCGCCATGCTACTTATCTACGTAGCCATGCATATGGAGTCAATGGGAAAAACCCATT |
| | GGAGCCAAGTACACTGACTCAATAGGGACTTTCCATTGGGTTTTGCCCAGTACATAAGGTCAATAGGGGGTGAGTCAACAGGAAAGTCCCATTGGAGC |
| | CAAGTACATTGAGTCAATAGGGACTTTCCAATGGGTTTTGCCCAGTACATAAGGTCAATGGGAGGTAAGCCAATGGGTTTTTCCCATTACTGACATGT |
| | ATACTGAGTCATTAGGGACTTTCCAATGGGTTTTGCCCAGTACATAAGGTCAATAGGGGTGAATCAACAGGAAAGTCCCATTGGAGCCAAGTACACTG |
| | AGTCAATAGGGACTTTCCATTGGGTTTTGCCCAGTACAAAAGGTCAATAGGGGGTGAGTCAATGGGTTTTTCCCATTATTGGCACATACATAAGGTCA |
| | ATAGGGGTGACTAGTGGAGAAGAGCATGCTTGAGGGCTGAGTGCCCCTCAGTGGGCAGAGAGCACATGGCCCACAGTCCCTGAGAAGTTGGGGGGAGG |
| | GGTGGGCAATTGAACTGGTGCCTAGAGAAGGTGGGGCTTGGGTAAACTGGGAAAGTGATGTGGTGTACTGGCTCCACCTTTTTCCCCAGGGTGGGGGA |
| | GAACCATATATAAGTGCAGTAGTCTCTGTGAACATTCAAGCTTCTGCCTTCTCCCTCCTGTGAGTTTGGTAAGTCACTGACTGTCTATGCCTGGGAAA |
| | GGGTGGGCAGGAGATGGGGCAGTGCAGGAAAAGTGGCACTATGAACCCTGCAGCCCTAGACAATTGTACTAACCTTCTTCTCTTTCCTCTCCTGACAG |
| | GTTGGTGTACAGTAGCTTCCGTTTAAACAGCCACCATGCAAATAGAGCTCTCCACCTGCTTCTTTCTGTGCCTTTTGCGATTCTGCTTTAGTGCCACC |
| | AGAAGATACTACCTGGGTGCAGTGGAACTGTCATGGGACTATATGCAAAGTGATCTCGGTGAGCTGCCTGTGGACGCAAGATTTCCTCCTAGAGTGCC |
| | AAAATCTTTTCCATTCAACACCTCAGTCGTGTACAAAAAGACTCTGTTTGTAGAATTCACGGATCACCTTTTCAACATCGCTAAGCCAAGGCCACCCT |
| | GGATGGGTCTGCTAGGTCCTACCATCCAGGCTGAGGTTTATGATACAGTGGTCATTACACTTAAGAACATGGCTTCCCATCCTGTCAGTCTTCATGCT |
| | GTTGGTGTATCCTACTGGAAAGCTTCTGAGGGAGCTGAATATGATGATCAGACCAGTCAAAGGGAGAAAGAAGATGATAAAGTCTTCCCTGGTGGAAG |
| | CCATACATATGTCTGGCAGGTCCTGAAAGAGAATGGTCCAATGGCCTCTGACCCACTGTGCCTTACCTACTCATATCTTTCTCATGTGGACCTGGTAA |
| | AAGACTTGAATTCAGGCCTCATTGGAGCCCTACTAGTATGTAGAGAAGGGAGTCTGGCCAAGGAAAAGACACAGACCTTGCACAAATTTATACTACTT |
| | TTTGCTGTATTTGATGAAGGGAAAAGTTGGCACTCAGAAACAAAGAACTCCTTGATGCAGGATAGGGATGCTGCATCTGCTCGGGCCTGGCCTAAAAT |
| | GCACACAGTCAATGGTTATGTAAACAGGTCTCTGCCAGGTCTGATTGGATGCCACAGGAAATCAGTCTATTGGCATGTGATTGGAATGGGCACCACTC |
| | CTGAAGTGCACTCAATATTCCTCGAAGGTCACACATTTCTTGTGAGGAACCATCGCCAGGCGTCCTTGGAAATCTCGCCAATAACTTTCCTTACTGCT |
| | CAAACACTCTTGATGGACCTTGGACAGTTTCTACTGTTTTGTCATATCTCTTCCCACCAACATGATGGCATGGAAGCTTATGTCAAAGTAGACAGCTG |
| | TCCAGAGGAACCCCAACTACGAATGAAAAATAATGAAGAAGCGGAAGACTATGATGATGATCTTACTGATTCTGAAATGGATGTGGTCAGGTTTGATG |
| | ATGACAACTCTCCTTCCTTTATCCAAATTCGCTCAGTTGCCAAGAAGCATCCTAAAACTTGGGTACATTACATTGCTGCTGAAGAGGAGGACTGGGAC |
| | TATGCTCCCTTAGTCCTCGCCCCCGATGACAGAAGTTATAAAAGTCAATATTTGAACAATGGCCCTCAGCGGATTGGTAGGAAGTACAAAAAAGTCCG |
| | ATTTATGGCATACACAGATGAAACCTTTAAGACTCGTGAAGCTATTCAGCATGAATCAGGAATCTTGGGACCTTTACTTTATGGGGAAGTTGGAGACA |
| | CACTGTTGATTATATTTAAGAATCAAGCAAGCAGACCATATAACATCTACCCTCACGGAATCACTGATGTCCGTCCTTTGTATTCAAGGAGATTACCA |
| | AAAGGTGTAAAACATTTGAAGGATTTTCCAATTCTGCCAGGAGAAATATTCAAATATAAATGGACAGTGACTGTAGAAGATGGGCCAACTAAATCAGA |
| | TCCTCGGTGCCTGACCCGCTATTACTCTAGTTTCGTTAATATGGAGAGAGATCTAGCTTCAGGACTCATTGGCCCTCTCCTCATCTGCTACAAAGAAT |
| | CTGTAGATCAAAGAGGAAACCAGATAATGTCAGACAAGAGGAATGTCATCCTGTTTTCTGTATTTGATGAGAACCGAAGCTGGTACCTCACAGAGAAT |
| | ATACAACGCTTTCTCCCCAATCCAGCTGGAGTGCAGCTTGAGGATCCAGAGTTCCAAGCCTCCAACATCATGCACAGCATCAATGGCTATGTTTTTGA |
| | TAGTTTGCAGTTGTCAGTTTGTTTGCATGAGGTGGCATACTGGTACATTCTAAGCATTGGAGCACAGACTGACTTCCTTTCTGTCTTCTTCTCTGGAT |
| | ATACCTTCAAACACAAAATGGTCTATGAAGACACACTCACCCTATTCCCATTCTCAGGAGAAACTGTCTTCATGTCGATGGAAAACCCAGGTCTATGG |
| | ATTCTGGGGTGCCACAACTCAGACTTTCGGAACAGAGGCATGACCGCCTTACTGAAGGTTTCTAGTTGTGACAAGAACACTGGTGATTATTACGAGGA |
| | CAGTTATGAAGATATTTCAGCATACTTGCTGAGTAAAAACAATGCCATTGAACCAAGAAGCTTCTCCCAGAATTCAAGACACCCTAGCACTAGGCAAA |
| | AGCAATTTAATGCCACCACAATTCCAGAAAATGACATAGAGAAGACTGACCCTTGGTTTGCACACAGAACACCTATGCCTAAAATACAAAATGTCTCC |
| | TCTAGTGATTTGTTGATGCTCTTGCGACAGAGTCCTACTCCACATGGGCTATCCTTATCTGATCTCCAAGAAGCCAAATATGAGACTTTTTCTGATGA |
| | TCCATCACCTGGAGCAATAGACAGTAATAACAGCCTGTCTGAAATGACACACTTCAGGCCACAGCTCCATCACAGTGGGGACATGGTATTTACCCCTG |
| | AGTCAGGCCTCCAATTAAGATTAAATGAGAAACTGGGGACAACTGCAGCAACAGAGTTGAAGAAACTTGATTTCAAAGTTTCTAGTACATCAAATAAT |
| | CTGATTTCAACAATTCCATCAGACAATTTGGCAGCAGGTACTGATAATACAAGTTCCTTAGGACCCCCAAGTATGCCAGTTCATTATGATAGTCAATT |
| | AGATACCACTCTATTTGGCAAAAAGTCATCTCCCCTTACTGAGTCTGGTGGACCTCTGAGCTTGAGTGAAGAAAATAATGATTCAAAGTTGTTAGAAT |
| | CAGGTTTAATGAATAGCCAAGAAAGTTCATGGGGAAAAAATGTATCGTCAACAGAGAGTGGTAGGTTATTTAAAGGGAAAAGAGCTCATGGACCTGCT |
| | TTGTTGACTAAAGATAATGCCTTATTCAAAGTTAGCATCTCTTTGTTAAAGACAAACAAAACTTCCAATAATTCAGCAACTAATAGAAAGACTCACAT |
| | TGATGGCCCATCATTATTAATTGAGAATAGTCCATCAGTCTGGCAAAATATATTAGAAAGTGACACTGAGTTTAAAAAAGTGACACCTTTGATTCATG |
| | ACAGAATGCTTATGGACAAAAATGCTACAGCTTTGAGGCTAAATCATATGTCAAATAAAACTACTTCATCAAAAAACATGGAAATGGTCCAACAGAAA |
| | AAAGAGGGCCCCATTCCACCAGATGCACAAAATCCAGATATGTCGTTCTTTAAGATGCTATTCTTGCCAGAATCAGCAAGGTGGATACAAAGGACTCA |
| | TGGAAAGAACTCTCTGAACTCTGGGCAAGGCCCCAGTCCAAAGCAATTAGTATCCTTAGGACCAGAAAAATCTGTGGAAGGTCAGAATTTCTTGTCTG |
| | AGAAAAACAAAGTGGTAGTAGGAAAGGGTGAATTTACAAAGGACGTAGGACTCAAAGAGATGGTTTTTCCAAGCAGCAGAAACCTATTTCTTACTAAC |
| | TTGGATAATTTACATGAAAATAATACACACAATCAAGAAAAAAAAATTCAGGAAGAAATAGAAAAGAAGGAAACATTAATCCAAGAGAATGTAGTTTT |
| | GCCTCAGATACATACAGTGACTGGCACTAAGAATTTCATGAAGAACCTTTTCTTACTGAGCACTAGGCAAAATGTAGAAGGTTCATATGACGGGGCAT |
| | ATGCTCCAGTACTTCAAGATTTTAGGTCATTAAATGATTCAACAAATAGAACAAAGAAACACACAGCTCATTTCTCAAAAAAAGGGGAGGAAGAAAAC |
| | TTGGAAGGCTTGGGAAATCAAACCAAGCAAATTGTAGAGAAATATGCATGCACCACAAGGATATCTCCTAATACAAGCCAGCAGAATTTTGTCACGCA |
| | ACGTAGTAAGAGAGCTTTGAAACAATTCAGACTCCCACTAGAAGAAACAGAACTTGAAAAAAGGATAATTGTGGATGACACCTCAACCCAGTGGTCCA |
| | AAAACATGAAACATTTGACCCCGAGCACCCTCACACAGATAGACTACAATGAGAAGGAGAAAGGGGCCATTACTCAGTCTCCCTTATCAGATTGCCTT |
| | ACGAGGAGTCATAGCATCCCTCAAGCAAATAGATCTCCATTACCCATTGCAAAGGTATCATCATTTCCATCTATTAGACCTATATATCTGACCAGGGT |
| | CCTATTCCAAGACAACTCTTCTCATCTTCCAGCAGCATCTTATAGAAAGAAAGATTCTGGGGTCCAAGAAAGCAGTCATTTCTTACAAGGAGCCAAAA |
| | AAAATAACCTTTCTTTAGCCATTCTAACCTTGGAGATGACTGGTGATCAAAGAGAGGTTGGCTCCCTGGGGACAAGTGCCACAAATTCAGTCACATAC |
| | AAGAAAGTTGAGAACACTGTTCTCCCGAAACCAGACTTGCCCAAAACATCTGGCAAAGTTGAATTGCTTCCAAAAGTTCACATTTATCAGAAGGACCT |
| | ATTCCCTACGGAAACTAGCAATGGGTCTCCTGGCCATCTGGATCTCGTGGAAGGGAGCCTTCTTCAGGGAACAGAGGGAGCGATTAAGTGGAATGAAG |
| | CAAACAGACCTGGAAAAGTTCCCTTTCTGAGAGTAGCAACAGAAAGCTCTGCAAAGACTCCCTCCAAGCTATTGGATCCTCTTGCTTGGGATAACCAC |
| | TATGGTACTCAGATACCAAAAGAAGAGTGGAAATCCCAAGAGAAGTCACCAGAAAAAACAGCTTTTAAGAAAAAGGATACCATTTTGTCCCTGAACGC |
| | TTGTGAAAGCAATCATGCAATAGCAGCAATAAATGAGGGACAAAATAAGCCCGAAATAGAAGTCACCTGGGCAAAGCAAGGTAGGACTGAAAGGCTGT |
| | GCTCTCAAAACCCACCAGTCTTGAAACGCCATCAACGGGAAATAACTCGTACTACTCTTCAGTCAGATCAAGAGGAAATTGACTATGATGATACCATA |
| | TCAGTTGAAATGAAGAAGGAAGATTTTGACATTTATGATGAGGATGAAAATCAGAGCCCCCGCAGCTTTCAAAAGAAAACACGACACTATTTTATTGC |
| | TGCAGTGGAGAGGCTCTGGGATTATGGGATGAGTAGCTCCCCACATGTTCTAAGAAACAGGGCTCAGAGTGGCAGTGTCCCTCAGTTCAAGAAAGTTG |
| | TTTTCCAGGAATTTACTGATGGCTCCTTTACTCAGCCCTTATACCGTGGAGAACTAAATGAACATTTGGGACTCCTGGGGCCATATATAAGAGCAGAA |
| | GTTGAAGATAATATCATGGTAACTTTCAGAAATCAGGCCTCTCGTCCCTATTCCTTCTATTCTAGCCTTATTTCTTATGAGGAAGATCAGAGGCAAGG |
| | AGCAGAACCTAGAAAAAACTTTGTCAAGCCTAATGAAACCAAAACTTACTTTTGGAAAGTGCAACATCATATGGCACCCACTAAAGATGAGTTTGACT |
| | GCAAAGCCTGGGCTTATTTCTCTGATGTTGACCTGGAAAAAGATGTGCACTCAGGCCTGATTGGACCCCTTCTGGTCTGCCACACTAACACACTGAAC |
| | CCTGCTCATGGGAGACAAGTGACAGTACAGGAATTTGCTCTGTTTTTCACCATCTTTGATGAGACCAAAAGCTGGTACTTCACTGAAAATATGGAAAG |
| | AAACTGCAGGGCTCCCTGCAATATCCAGATGGAAGATCCCACTTTTAAAGAGAATTATCGCTTCCATGCAATCAATGGCTACATAATGGATACACTAC |
| | CTGGCTTAGTAATGGCTCAGGATCAAAGGATTCGATGGTATCTGCTCAGCATGGGCAGCAATGAAAACATCCATTCTATTCATTTCAGTGGACATGTG |
| | TTCACTGTACGAAAAAAAGAGGAGTATAAAATGGCACTGTACAATCTCTATCCAGGTGTTTTTGAGACAGTGGAAATGTTACCATCCAAAGCTGGAAT |
| | TTGGCGGGTGGAATGCCTTATTGGCGAGCATCTACATGCTGGGATGAGCACACTTTTTCTGGTGTACAGCAATAAGTGTCAGACTCCCCTGGGAATGG |
| | CTTCTGGACACATTAGAGATTTTCAGATTACAGCTTCAGGACAATATGGACAGTGGGCCCCAAAGCTGGCCAGACTTCATTATTCCGGATCAATCAAT |
| | GCCTGGAGCACCAAGGAGCCCTTTTCTTGGATCAAGGTGGATCTGTTGGCACCAATGATTATTCACGGCATCAAGACCCAGGGTGCCCGTCAGAAGTT |
| | CTCCAGCCTCTACATCTCTCAGTTTATCATCATGTATAGTCTTGATGGGAAGAAGTGGCAGACTTATCGAGGAAATTCCACTGGAACCTTAATGGTCT |
| | TCTTTGGCAATGTGGATTCATCTGGGATAAAACACAATATTTTTAACCCTCCAATTATTGCTCGATACATCCGTTTGCACCCAACTCATTATAGCATT |
| | CGCAGCACTCTTCGCATGGAGTTGATGGGCTGTGATTTAAATAGTTGCAGCATGCCATTGGGAATGGAGAGTAAAGCAATATCAGATGCACAGATTAC |
| | TGCTTCATCCTACTTTACCAATATGTTTGCCACCTGGTCTCCTTCAAAAGCTCGACTTCACCTCCAAGGGAGGAGTAATGCCTGGAGACCTCAGGTGA |
| | ATAATCCAAAAGAGTGGCTGCAAGTGGACTTCCAGAAGACAATGAAAGTCACAGGAGTAACTACTCAGGGAGTAAAATCTCTGCTTACCAGCATGTAT |
| | GTGAAGGAGTTCCTCATCTCCAGCAGTCAAGATGGCCATCAGTGGACTCTCTTTTTTCAGAATGGCAAAGTAAAGGTTTTTCAGGGAAATCAAGACTC |
| | CTTCACACCTGTGGTGAACTCTCTAGACCCACCGTTACTGACTCGCTACCTTCGAATTCACCCCCAGAGTTGGGTGCACCAGATTGCCCTGAGGATGG |
| | AGGTTCTGGGCTGCGAGGCACAGGACCTCTACTGATTAATTAATAAAATACAGCATAGCAAAACTTTAACCTCCAAATCAAGCCTCTACTTGAATCCT |
| | TTTCTGAGGGATGAATAAGGCATAGGCATCAGGGGCTGTTGCCAATGTGCATTAGCTGTTTGCAGCCTCACCTTCTTTCATGGAGTTTAAGATATAGT |
| | GTATTTTCCCAAGGTTTGAACTAGCTCTTCATTTCTTTATGTTTTAAATGCACTGACCTCCCACATTCCCTTTTTAGTAAAATATTCAGAAATAATTT |
| | AAATACATCATTGCAATGAAAATAAATGTTTTTTATTAGGCAGAATCCAGATGCTCAAGGCCCTTCATAATATCCCCCAGTTTAGTAGTTGGACTTAG |
| | GGAACAAAGGAACCTTTAATAGAAATTGGACAGCAAGAAAGCGAGCTCCATAAAGTAGGAAACACTACACGATTCCATAAAGTAGGAAACACTACATC |
| | ACTCCATAAAGTAGGAAACACTACACAGACATGATAAGATACATTGATGAGTTTGGACAAACCACAACTAGAATGCAGTGAAAAAAATGCTTTATTTG |
| | TGAAATTTGTGATGCTATTGCTTTATTTGTAACCATTATAAGCTGCAATAAACAAGTTAACAACAACAATTGCATTCATTTTATGTTTCAGGTTCAGG |
| | GGGAGATGTGGGAGGTTTTTTAAAGCAAGTAAAACCTCTACAAATGTGGTACTTAAGCATGGCTACGTAGATAAGTAGCATGGCGGGTTAATCATTAA |
| | CTACACCTGCAGGAGGAACCCCTAGTGATGGAGTTGGCCACTCCCTCTCTGCGCGCTCGCTCGCTCACTGAGGCCGGGCGACCAAAGGTCGCCCGACG |
| | CCCGGGCGGCCTCAGTGAGCGAGCGAGCGCGCAGCTGCCTGCAGGGGCGCGCCGCTAGCAGCTGATGCATAGCATGCGGTACCGGGAGATGGGGGAGG |
| | CTAACTGAAACACGGAAGGAGACAATACCGGAAGGAACCCGCGCTATGACGGCAATAAAAAGACAGAATAAAACGCACGGGTGTTGGGTCGTTTGTTC |
| | ATAAACGCGGGGTTCGGTCCCAGGGCTGGCACTCTGTCGATACCCCACCGAGACCCCATTGGGACCAATACGCCCGCGTTTCTTCCTTTTCCCCACCC |
| | CAACCCCCAAGTTCGGGTGAAGGCCCAGGGCTCGCAGCCAACGTCGGGGCGGCAAGCCCTGCCATAGCCACTACGGGTACGTAGGCCAACCACTAGAA |
| | CTATAGCTAGAGTCCTGGGCGAACAAACGATGCTCGCCTTCCAGAAAACCGAGGATGCGAACCACTTCATCCGGGGTCAGCACCACCGGCAAGCGCCG |
| | CGACGGCCGAGGTCTACCGATCTCCTGAAGCCAGGGCAGATCCGTGCACAGCACCTTGCCGTAGAAGAACAGCAAGGCCGCCAATGCCTGACGATGCG |
| | TGGAGACCGAAACCTTGCGCTCGTTCGCCAGCCAGGACAGAAATGCCTCGACTTCGCTGCTGCCCAAGGTTGCCGGGTGACGCACACCGTGGAAACGG |
| | ATGAAGGCACGAACCCAGTTGACATAAGCCTGTTCGGTTCGTAAACTGTAATGCAAGTAGCGTATGCGCTCACGCAACTGGTCCAGAACCTTGACCGA |
| | ACGCAGCGGTGGTAACGGCGCAGTGGCGGTTTTCATGGCTTGTTATGACTGTTTTTTTGTACAGTCTATGCCTCGGGCATCCAAGCAGCAAGCGCGTT |
| | ACGCCGTGGGTCGATGTTTGATGTTATGGAGCAGCAACGATGTTACGCAGCAGCAACGATGTTACGCAGCAGGGCAGTCGCCCTAAAACAAAGTTAGG |
| | TGGCTCAAGTATGGGCATCATTCGCACATGTAGGCTCGGCCCTGACCAAGTCAAATCCATGCGGGCTGCTCTTGATCTTTTCGGTCGTGAGTTCGGAG |
| | ACGTAGCCACCTACTCCCAACATCAGCCGGACTCCGATTACCTCGGGAACTTGCTCCGTAGTAAGACATTCATCGCGCTTGCTGCCTTCGACCAAGAA |
| | GCGGTTGTTGGCGCTCTCGCGGCTTACGTTCTGCCCAGGTTTGAGCAGCCGCGTAGTGAGATCTATATCTATGATCTCGCAGTCTCCGGCGAGCACCG |
| | GAGGCAGGGCATTGCCACCGCGCTCATCAATCTCCTCAAGCATGAGGCCAACGCGCTTGGTGCTTATGTGATCTACGTGCAAGCAGATTACGGTGACG |
| | ATCCCGCAGTGGCTCTCTATACAAAGTTGGGCATACGGGAAGAAGTGATGCACTTTGATATCGACCCAAGTACCGCCACCTAACAATTCGTTCAAGCC |
| | GAGATCGGCTTCCCGGCCGCGGAGTTGTTCGGTAAATTGTCACAACGCCGCGAATATAGTCTTTACCATGCCCTTGGCCACGCCCCTCTTTAATACGA |
| | CGGGCAATTTGCACTTCAGAAAATGAAGAGTTTGCTTTAGCCATAACAAAAGTCCAGTATGCTTTTTCACAGCATAACTGGACTGATTTCAGTTTACA |
| | ACTATTCTGTCTAGTTTAAGACTTTATTGTCATAGTTTAGATCTATTTTGTTCAGTTTAAGACTTTATTGTCCGCCCACACCCGCTTACGCAGGGCAT |
| | CCATTTATTACTCAACCGTAACCGATTTTGCCAGGTTACGCGGCTGGTCTGCGGTGTGAAATACCGCACAGATGCGTAAGGAGAAAATACCGCATCAG |
| | GCGCTCTTCCGCTTCCTCGCTCACTGACTCGCTGCGCTCGGTCGTTCGGCTGCGGCGAGCGGTATCAGCTCACTCAAAGGCGGTAATACGGTTATCCA |
| | CAGAATCAGGGGATAACGCAGGAAAGAACATGTGAGCAAAAGGCCAGCAAAAGGCCAGGAACCGTAAAAAGGCCGCGTTGCTGGCGTTTTTCCATAGG |
| | CTCCGCCCCCCTGACGAGCATCACAAAAATCGACGCTCAAGTCAGAGGTGGCGAAACCCGACAGGACTATAAAGATACCAGGCGTTTCCCCCTGGAAG |
| | CTCCCTCGTGCGCTCTCCTGTTCCGACCCTGCCGCTTACCGGATACCTGTCCGCCTTTCTCCCTTCGGGAAGCGTGGCGCTTTCTCAATGCTCACGCT |
| | GTAGGTATCTCAGTTCGGTGTAGGTCGTTCGCTCCAAGCTGGGCTGTGTGCACGAACCCCCCGTTCAGCCCGACCGCTGCGCCTTATCCGGTAACTAT |
| | CGTCTTGAGTCCAACCCGGTAAGACACGACTTATCGCCACTGGCAGCAGCCACTGGTAACAGGATTAGCAGAGCGAGGTATGTAGGCGGTGCTACAGA |
| | GTTCTTGAAGTGGTGGCCTAACTACGGCTACACTAGAAGGACAGTATTTGGTATCTGCGCTCTGCTGAAGCCAGTTACCTTCGGAAAAAGAGTTGGTA |
| | GCTCTTGATCCGGCAAACAAACCACCGCTGGTAGCGGTGGTTTTTTTGTTTGCAAGCAGCAGATTACGCGCAGAAAAAAAGGATCTCAAGAAGATCCT |
| | TTGATCTTTTCTACGGGGTCTGACGCTCAGTGGAACGAAAACTCACGTTAAGGGATTTTGGTCATGAGATTATCAAAAAGGATCTTCACCTAGATCCT |
| | TTTAAATTAAAAATGAAGTTTTAAATCAATCTAAAGTATATATGAGTAAACTTGGTCTGACAGTTACCAATGCTTAATCAGTGAGGCACCTATCTCAG |
| | CGATCTGTCTATTTCGTTCATCCATAGTTGCCTGACTCCCCGTCGTGTAGATAACTACGATACGGGAGGGCTTACCATCTGGCCCCAGTGCTGCAATG |
| | ATACCGCGAGACCCACGCTCACCGGCTCCAGATTTATCAGCAATAAACCAGCCAGCCGGAAGGGCCGAGCGCAGAAGTGGTCCTGCAACTTTATCCGC |
| | CTCCATCCAGTCTATTAATTGTTGCCGGGAAGCTAGAGTAAGTAGTTCGCCAGTTAATAGTTTGCGCAACGTTGTTGCCATTGCTACAGGCATCGTGG |
| | TGTCACGCTCGTCGTTTGGTATGGCTTCATTCAGCTCCGGTTCCCAACGATCAAGGCGAGTTACATGATCCCCCATGTTGTGCAAAAAAGCGGTTAGC |
| | TCCTTCGGTCCTCCGATCGTTGTCAGAAGTAAGTTGGCCGCAGTGTTATCACTCATGGTTATGGCAGCACTGCATAATTCTCTTACTGTCATGCCATC |
| | CGTAAGATGCTTTTCTGTGACTGGTGAGTACTCAACCAAGTCATTCTGAGAATAGTGTATGCGGCGACCGAGTTGCTCTTGCCCGGCGTCAATACGGG |
| | ATAATACCGCGCCACATAGCAGAACTTTAAAAGTGCTCATCATTGGAAAACGTTCTTCGGGGCGAAAACTCTCAAGGATCTTACCGCTGTTGAGATCC |
| | AGTTCGATGTAACCCACTCGTGCACCCAACTGATCTTCAGCATCTTTTACTTTCACCAGCGTTTCTGGGTGAGCAAAAACAGGAAGGCAAAATGCCGC |
| | AAAAAAGGGAATAAGGGCGACACGGAAATGTTGAATACTCATACTCTTCCTTTTTCAATATTATTGAAGCATTTATCAGGGTTATTGTCTCATGAGCG |
| | GATACATATTTGAATGTATTTAGAAAAATAAACAAATAGGGGTTCCGCGCACATTTCCCCGAAAAGTGCCACCTGAAATTGTAAACGTTAATATTTTG |
| | TTAAAATTCGCGTTAAATTTTTGTTAAATCAGCTCATTTTTTAACCAATAGGCCGAAATCGGCAAAATCCCTTATAAATCAAAAGAATAGACCGAGAT |
| | AGGGTTGAGTGTTGTTCCAGTTTGGAACAAGAGTCCACTATTAAAGAACGTGGACTCCAACGTCAAAGGGCGAAAAACCGTCTATCAGGGCGATGGCC |
| | CACTACGTGAACCATCACCCTAATCAAGTTTTTTGGGGTCGAGGTGCCGTAAAGCACTAAATCGGAACCCTAAAGGGAGCCCCCGATTTAGAGCTTGA |
| | CGGGGAAAGCCGGCGAACGTGGCGAGAAAGGAAGGGAAGAAAGCGAAAGGAGCGGGCGCTAGGGCGCTGGCAAGTGTAGCGGTCACGCTGCGCGTAAC |
| | CACCACACCCGCCGCGCTTAATGCGCCGCTACAGGGCGCGTCCCATTCGCCATTCAGGCTGCAAATAAGCGTTGATATTCAGTCAATTACAAACATTA |
| | ATAACGAAGAGATGACAGAAAAATTTTCATTCTGTGACAGAGAA |

| ceDNA Vector | |
|---|---|
| Name | Elements arranged from 5′ to 3′ (Left ITR to Right ITR) |
| ceDNAFVIII- | left-ITR_v1 - spacer_left-ITR_v1 - NotI_site - hAAT_PromoterSet - |
| vector 1 | PmeI_site - Mod_Minimum_Consensus_Kozak - |
| | hFactorVIII_WT_ORF_v2 - PacI_site - WPRE_3pUTR - bGH - |
| | spacer_right-ITR_v1 - right-ITR_v1 |
| ceDNAFVIII- | left-ITR_v1 - spacer_left-ITR_v1 - NotI_site - hAAT_PromoterSet - |
| vector 2 | PmeI_site - Mod_Minimum_Consensus_Kozak - hVIII-BDD-SQ_codopOZ - |
| | PacI_site - WPRE_3pUTR - bGH - spacer_right-ITR_v1 - right-ITR_v1 |
| ceDNAFVIII- | left-ITR_v1 - spacer_left-ITR_v1 - NotI_site - LPl_Promoter_Set - |
| vector 3 | PmeI_site - Mod_Minimum_Consensus_Kozak - |
| | hFactorVIII_WT_ORF_v2 - PacI_site - WPRE_3pUTR - bGH - |
| | spacer_right-ITR_v1 - right-ITR_v1 |
| ceDNAFVIII- | left-ITR_v1 - spacer_left-ITR_v1 - NotI_site - LPl_Promoter_Set - |
| vector 4 | PmeI_site - Mod_Minimum_Consensus_Kozak - hVIII-BDD-SQ_codopOZ - |
| | PacI_site - WPRE_3pUTR - bGH - spacer_right-ITR_v1 - right-ITR_v1 |
| ceDNAFVIII- | left-ITR_v1 - spacer_left-ITR_v1 - NotI_site - |
| vector 5 | hEF1a_FullLength_Promoter - PmeI_site - |
| | Mod_Minimum_Consensus_Kozak - hFactorVIII_WT_ORF_v2 - PacI_site - |
| | WPRE_3pUTR - bGH - spacer_right-ITR_v1 - right-ITR_v1 |
| ceDNAFVIII- | left-ITR_v1 - spacer_left-ITR_v1 - NotI_site - |
| vector 6 | hEF1a_FullLength_Promoter - PmeI_site - |
| | Mod_Minimum_Consensus_Kozak - hVIII-BDD-SQ_codopOZ - PacI_site - |
| | WPRE_3pUTR - bGH - spacer_right-ITR_v1 - right-ITR_v1 |
| ceDNAFVIII- | left-ITR_v1 - spacer_left-ITR_v1 - NotI_site - LPl_Promoter_Set - |
| vector 7 | PmeI_site - Mod_Minimum_Consensus_Kozak - |
| | hFactorVIII_206variant_ORF_v1 - PacI_site - WPRE_3pUTR - bGH - |
| | spacer_right-ITR_v1 - right-ITR_v1 |
| ceDNAFVIII- | left-ITR_v1 - spacer_left-ITR_v1 - NotI_site - |
| vector 8 | hEF1a_FullLength_Promoter - PmeI_site - |
| | Mod_Minimum_Consensus_Kozak - hFactorVIII_206variant_ORF_v1 - |
| | PacI_site - WPRE_3pUTR - bGH - spacer_right-ITR_v1 - right-ITR_v1 |
| ceDNAFVIII- | left-ITR_v1 - spacer_left-ITR_v2.1 - CMV_enhancer - gB-actin_Promoter - |
| vector 9 | Consensus_Kozak - XbaLsite - PmeI_site - |
| | Mod_Minimum_Consensus_Kozak - hVIII-BD-SQ_codopOZ - PacI_site - |
| | WPRE_3pUTR - mir-142_3pUTR - bGH - spacer_right-ITR_v2.1 - right-ITR_v1 |
| ceDNAFVIII- | left-ITR_v1 - spacer_left-ITR_v2.1 - hAAT_PromoterSet - PmeI_site - |
| vector 10 | Mod_Minimum_Consensus_Kozak - hVIII-BDD-SQ_codopOZ - PacI_site - |
| | WPRE_3pUTR - mir-142_3pUTR - bGH - spacer_right-ITR_v2.1 - right-ITR_v1 |
| ceDNAFVIII- | left-ITR_v1 - spacer_left-ITR_v2.1 - VandenDriessche_PromoterSet - |
| vector 11 | PmeI_site - Mod_Minimum_Consensus_Kozak - hVIII-BDD-SQ_codopOZ - |
| | PacI_site - WPRE_3pUTR - bGH - spacer_right-ITR_v1 - right-ITR_v1 |
| ceDNAFVIII- | left-ITR_v1 - spacer_left-ITR_v1 - BMN270_Enhancer - |
| vector 12 | BMN270_Promoter - BMN270_5pUTR - BMN270_hFVIII-BDD-SQ - |
| | BMN270_polyA - spacer_right-ITR_v1 - right-ITR_v1 |
| ceDNAFVIII- | left-ITR_v1 - spacer_left-ITR_v1 - SPK8011_Promoter - SPK8011_5pUTR - |
| vector 13 | SPK8011_hFVIII-BDD-SQ - SPK8011_polyA - spacer_right-ITR_v1 - |
| | right-ITR_v1 |
| ceDNAFVIII- | left-ITR_v1 - spacer_left-ITR_v1 - Minimum_Consensus_Kozak - |
| vector 14 | TTR_liver_specific_Promoter - SangamoCRMSBS2-Intron3_5pUTR - |
| | SangamoCRMSBS2-Intron3_hFVIII-BDD-SQ - |
| | SangamoCRMSBS2_polyA - spacer_right-ITR_v1 - right-ITR_v1 |
| ceDNAFVIII- | left-ITR_v1 - spacer_left-ITR_v1 - hAAT_PromoterSet - PmeI_site - |
| vector 15 | Consensus_Kozak - hVIII-BDD-SQ_codopOZ - PacI_site - WPRE_3pUTR - |
| | bGH - spacer_right-ITR_v1 - right-ITR_v1 |
| ceDNAFVIII- | left-ITR_v1 - spacer_left-ITR_v1 - hAAT_PromoterSet - PmeI_site - |
| vector 16 | Consensus_Kozak - Nathwani_hFVIII-BDD-V3 - PacI_site - |
| | WPRE_3pUTR - bGH - spacer_right-ITR_v1 - right-ITR_v1 |
| ceDNAFVIII - | left-ITR_v1 - spacer_left-ITR_v1 - hAAT_PromoterSet - PmeI_site - |
| vector 17 | Consensus_Kozak - Nathwani_hFVIII-BDD-V3 - PacI_site - |
| | WPRE_3pUTR - mir-142_3pUTR - bGH - spacer_right-ITR_v1 - right-ITR_v1 |
| ceDNAFVIII- | left-ITR_v1 - spacer_left-ITR_v1 - VandenDriessche_PromoterSet - |
| vector 18 | PmeI_site - Consensus_Kozak - hVIII-BDD-SQ_codopOZ - PacI_site - |
| | WPRE_3pUTR - bGH - spacer_right-ITR_v1 - right-ITR_v1 |
| ceDNAFVIII- | left-ITR_v1 - spacer_left-ITR_v1 - VandenDriessche_PromoterSet - |
| vector 19 | PmeI_site - Consensus_Kozak - Nathwani_hFVIII-BDD-V3 - PacI_site - |
| | WPRE_3pUTR - bGH - spacer_right-ITR_v1 - right-ITR_v1 |
| ceDNAFVIII- | left-ITR_v1 - spacer_left-ITR_v1 - VandenDriessche_PromoterSet - |
| vector 20 | PmeI_site - Consensus_Kozak - Nathwani_hFVIII-BDD-V3 - PacI_site - |
| | WPRE_3pUTR - mir-142_3pUTR - bGH - spacer_right-ITR_v1 - right-ITR_v1 |
| ceDNAFVIII- | left-ITR_v1 - spacer_left-ITR_v1 - NotI_site - CAG_PromoterSet - |
| vector 21 | PmeI_site - Consensus_Kozak - hVIII-BDD-SQ_codopOZ - PacI_site - |
| | WPRE_3pUTR - mir-142_3pUTR - bGH - spacer_right-ITR_v1 - right-ITR_v1 |
| ceDNAFVIII- | left-ITR_v1 - spacer_left-ITR_v1 - CET_PromoterSet - PmeI_site - |
| vector 22 | Consensus_Kozak - Nathwani_hFVIII - BDD-V3 - PacI_site - |
| | WPRE_3pUTR - mir-142_3pUTR - bGH - XbaLsite - spacer_right- |
| | ITR_v1 - right-ITR_v1 |
| ceDNAFVIII- | left-ITR_v1 - spacer_left-ITR_v1 - VandenDriessche_PromoterSet - |
| vector 23 | PmeI_site - Consensus_Kozak - hFVIII-226variant-F309S_CpGmin- |
| | codop_ORF - PacI_site - WPRE_3pUTR - bGH - spacer_right-ITR_v1 - right-ITR_v1 |
| ceDNAFVIII- | left- ITR_v1 - spacer_left-ITR_v1 - VandenDriessche_PromoterSet - |
| vector 24 | PmeI_site - Consensus_Kozak - Endo_hFVIII_cDNA - PacI_site - |
| | WPRE_3pUTR - bGH - spacer_right-ITR_v1 - right-ITR_v1 |
| ceDNAFVIII- | left-ITR_v1 - spacer_left-ITR_v2 - NdeLsite - CET_PromoterSet - |
| vector 25 | PmeI_site - Mod_Minimum_Consensus_Kozak - hFactorVIII- |
| | BDD_CpGmin-codop_ORF - PacI_site - HBB_3pUTR - mir-142_3pUTR - |
| | SV40_polyA - spacer_right-ITR_v2 - right-ITR_v1 |
| ceDNAFVIII- | left-ITR_v1 - spacer_left-ITR_v2 - NdeLsite - CET_PromoterSet - |
| vector 26 | PmeI_site - Mod_Minimum_Consensus_Kozak - Endo_hFVIII_cDNA - |
| | PacI_site - HBB_3pUTR - mir-142_3pUTR - SV40_polyA - spacer_right- |
| | ITR_v2 - right-ITR_v1 |

[0589] Test articles were supplied in a concentrated stock, and stored at nominally 4° C. Formulations were not vortexed or centrifuged. Groups were housed in clear polycarbonate cages with contact bedding on a ventilated rack in a procedure room. Food and filtered tap water acidified with 1N HCl to a targeted pH of 2.5-3.0 were provided to the animals ad libitum. Blood was collected at interim and terminal time points as set forth below:

| | Sample Collection Times | |
|---|---|---|
| Group | Saphenous or Orbital Bleed | Terminal |
| Number | Plasma | |
| 1-10 | Days 3 | Day 7 |
| Volume/ | 120 μL whole blood | MOV |
| Portion | | |
| Processing/ | 120 μI, whole blood was | 600 μI, whole blood |
| Storage | added to tube pre-coated | was added to tube |
| | with 13.33 μL of 3.2% | pre-coated with 66.6 μI, of 3.2% |
| | sodium citrate and kept | sodium citrate and kept |
| | ambient until processed | ambient until processed |
| | One (1) aliquot of plasma | Four (4) aliquots of plasma |
| | Frozen at nominally −70° C. | Frozen at nominally −70° C. |

[0590] Blood sample collection was as follows:

| Volume (mL) | Sample | | | D28 |
|---|---|---|---|---|
| Whole Blood | Destination | D −3 (~) | D 3, 7, 14, 21 | (terminal) |
| 0.15 | cytokine | | | |
| 0.05 | PHE assay × 2 | 0.05 | 0.05 | 0.6 |
| | total/day (mL) | 0.05 | 0.05 | 0.6 |

[0591] Study details are provided as follows:
[0592] Species (number, sex, age): C57BL/6 (JAX 000664) mice (N=40 and 4 spare, male, 6 weeks of age at arrival) from Jackson Laboratories.
[0593] Class of Compound: ceDNA.
[0594] Cage Side Observations: Cage side observations were performed daily.
[0595] Clinical Observations: Clinical observations were performed 1, 5-6 and 24 hours post dose on Day 0.
[0596] Body Weights: Body weight for all animals was recorded on Days 0, 3 and 7, including prior to euthanasia.
[0597] Dose Formulation: Test articles were supplied in a concentration stock. Stock was diluted with PBS immediately prior to use. Prepared materials were stored at −4° C. (or on wet ice) if dosing was not performed immediately.
[0598] Dose Administration: Test Materials were dosed on Day 0 by hydrodynamic IV administration, at a set volume per animal, 90-100 ml/kg (dependent on the lightest animal in the group) via lateral tail vein (dosed within 5 seconds).
[0599] Blood Collection: Animals had interim blood collected on Day 3 per the table above. After each collection, animals received 0.5-1.0 mL lactated Ringer's, subcutaneously. Animals had blood collected according to the blood collection tables above. For plasma collections, whole blood was collected into non-coated Eppendorf style tubes. Immediately 120 μL was withdrawn and placed into tubes containing 13.33 μL of 3.2% sodium citrate. Blood was gently mixed and maintained ambient until processed. Whole blood samples were centrifuged at 2,000 g for 15 minutes under ambient conditions (20-25° C.). Plasma samples were withdrawn avoiding the cell pack. One (1) aliquot was made and any clotting in the whole blood sample or hemolysis in the plasma was noted. All samples were stored at nominally −70° C. All samples were stored at nominally −70° C. until shipped.
[0600] Anesthesia Recovery: Animals were monitored continuously while under anesthesia, during recovery and until mobile.
[0601] Euthanasia & Terminal Blood Collection: On Day 7, animals were euthanized by CO₂ asphyxiation followed by thoracotomy and exsanguination. Maximum obtainable blood volume was collected by cardiac puncture and processed to serum per facility SOPS and stored in two (2) aliquots. For plasma collections, whole blood was collected by syringe and 600 μL, placed immediately in tubes containing 66.66 μL of 3.2% sodium citrate. Blood was gently mixed and maintained ambient until processed. Whole blood samples were centrifuged at 2,000 g for 15 minutes under ambient conditions (20-25° C.). Plasma samples were withdrawn avoiding the cell pack and four (4) aliquots made. Any clotting in the whole blood sample or hemolysis in the plasma was noted.

[0602] Results: The results shown in FIGS. 12-15 show the effect of the various ceDNA vectors expressing FVIII on serum FVIII levels, where detection of FVIII in the serum indicated that the ceDNA vector was able to express FVIII after injection. FIG. 12 is a graph that depicts plasma FVIII concentration (IU/ml) 3 days after hydrodynamic delivery of various ceDNA vectors expressing FVIII (ceDNAFVIII-vector 4, ceDNAFVIII-vector 6, ceDNAFVIII-vector 12, ceDNAFVIII-vector 14, ceDNAFVIII-vector 16, ceDNAFVIII-vector 18, ceDNAFVIII-vector 19, ceDNAFVIII-vector 21, ceDNAFVIII-vector 22). ceDNAFVIII-vector 16, ceDNAFVIII-vector 19 and ceDNAFVIII-vector 21 showed the highest plasma Factor VIII concentration after 3 days. Vehicle only was used as control. FIG. 13 is a graph that depicts plasma FVIII concentration (IU/ml) 3 days after hydrodynamic delivery of various ceDNA vectors expressing FVIII (ceDNAFVIII-vector 1, ceDNAFVIII-vector 2, ceDNAFVIII-vector 3, ceDNAFVIII-vector 5, ceDNAFVIII-vector 7, ceDNAFVIII-vector 8, ceDNAFVIII-vector 12, ceDNAFVIII-vector 13, ceDNAFVIII-vector 15). ceDNAFVIII-vector 8 showed the highest plasma Factor VIII concentration after 3 days. Vehicle only was used as control. FIG. 14 is a graph that depicts plasma FVIII concentration (IU/ml) 3 days after hydrodynamic delivery of various ceDNA vectors expressing FVIII (ceDNAFVIII-vector 9, ceDNAFVIII-vector 10, ceDNAFVIII-vector 11, ceDNAFVIII-vector 12, ceDNAFVIII-vector 17, ceDNAFVIII-vector 20, ceDNAFVIII-vector 24, ceDNAFVIII-vector 25, ceDNAFVIII-vector 26). ceDNAFVIII-vector 17 and ceDNAFVIII-vector 20 showed the highest plasma Factor VIII concentration after 3 days. Vehicle only was used as control. FIG. 15 is a graph that depicts plasma FVIII concentration (IU/ml) 1 day after hydrodynamic delivery of escalating doses of ceDNAFVIII-vector 23 (0.005-50 μg). As shown in FIG. 15, plasma FVIII increased in a dose-dependent manner with increasing dosage of ceDNAFVIII-vector 23. Vehicle only was used as control.

### Example 14: FVIII Expression after LNP:ceDNA Delivery in Combination with a Kinase Inhibitor in Male CD-1 Mice

[0603] LNP:ceDNA vectors were prepared as described in Example 6. The effect of ceDNA:lipid formulations were tested in male CD-1 mice. The vehicle for dosing and inhibitor preparation was 0.500 methylcellulose.

[0604] LNP:ceDNA test material (ceDNAFVIII-vector 23) was administered as follows:

| | Animals | | Dose | Dose | | |
|---|---|---|---|---|---|---|
| Group | per | | Level | Volume | Treatment | Terminal |
| No. | Group | Treatment | (mg/kg | (mL/kg) | Regimen, IV | Time Point |
| 1 | 5 | PBS | 2.0 | 5 | Once on Day 0 | Day 7 |
| 2 | 5 | ceDNAFVIII-vector 23 | 2.0 | | | |

| | |
|---|---|
| Test article storage (stock formulations): | Comments: |
| Test article for Groups 1-2 was supplied | Residual TA, both diluted and stock, was |
| in a concentrated stock (1.0 mg/mL) and | stored at nominally 4° C. until dosing is |
| stored nominally −80° C. until use. | complete, then discarded. |
| Do not vortex or centrifuge formulations. | Chow/Water: Mouse Diet 5058 and filtered |
| Housing: Group housed in clear | tap water acidified with 1N HCl to a targeted |
| polycarbonate cages with contact bedding | pH of 2.5-3.0 were provided to the animals |
| in a ventilated rack in a procedure room. | ad libitum. |

No. = Number;
IV = intravenous;
ROA = route of administration

[0605] Blood (interim and terminal) samples were collected as set forth below:

| | Sample Collection Times | |
|---|---|---|
| Group | Whole Blood (orbital) | Terminal Whole Blood (cardiac) |
| Number | Sodium Citrate Plasma | |
| 1-2 | Day 3 | Day 7 |
| Volume/ | 120 A whole blood | MOV |
| Portion | | |
| Processing/ | whole blood was added to | 600 μ1_, whole blood was |
| Storage | tube pre-coated with 13.33 | added to tube pre-coated with |
| | pi of 3.2% sodium citrate | 66.6 1. μL of 3.2% sodium |
| | and kept ambient | citrate and kept ambient |
| | until processed | until processed |
| | One (1) aliquot of plasma | Two (2) aliquots of plasma |
| | Frozen at nominally −70° C. | Frozen at nominally −70° C. |

[0606] Tissue samples were collected as set forth below:

| Group | Sample Collection Times |
|---|---|
| Number | Liver |
| 1-2 | On Day 7 |
| Volume/Portion | Whole organ, divided |
| Processing | Whole organ weight 4× = 25-50 mg |
| | pieces weighed and snap frozen individually |
| | (Lake Pharma) |
| Storage | Frozen at nominally −70° C. |

[0607] Study details are provided as follows:
[0608] Species (number, sex, age): CD-1 mice (N=10+2 spare, male, 4 weeks of age at arrival) from Charles River Laboratories.
[0609] Cage Side Observations: Cage side observations were performed daily.
[0610] Clinical Observations: Clinical observations were performed about 1, 5-6 and 24 hours post Day 0 Test Material dose.
[0611] Body Weights: Body weight for all animals was recorded on Days 0, 1, 2, 3, and 7, including prior to euthanasia.
[0612] Test Material Dose Formulation: Test articles were supplied in a concentration stock. Stock diluted with PBS immediately prior to use. Prepared materials were stored at ˜4° C. (or on wet ice) if dosing was not performed immediately.
[0613] Dose Administration: Test articles were dosed at 5 mL/kg on Day 0 for Groups 1-2 by intravenous administration via lateral tail vein.
[0614] Blood Collection: All animals in Groups 1-2 had interim blood collected on Day 3 per blood collection table above. After each collection animals received 0.5-1.0 mL lactated Ringer's, subcutaneously. For plasma collections, whole blood was collected into non-coated Eppendorf style tubes via orbital sinus puncture under anesthesia per facility SOPS. Immediately 120 μL was withdrawn and placed into tubes containing 13.33 pl of 3.2% sodium citrate. Blood was gently mixed and maintained ambient until processed. Whole blood samples were centrifuged at 2,000 g for 15 minutes under ambient conditions (20-25° C.). Plasma samples were withdrawn avoiding the cell pack. One (1) aliquot was made and any clotting in the whole blood sample or hemolysis in the plasma will be noted.
[0615] Anesthesia Recovery: Animals were monitored continuously while under anesthesia, during recovery and until mobile.
[0616] Terminal Blood Collection: On Day 7, animals were euthanized by CO₂ asphyxiation followed by thoracotomy and exsanguination. Maximum obtainable blood volume was collected by cardiac puncture and processed to plasma. For plasma collections, whole blood was collected by syringe and 600 μL placed immediately tubes containing 66.66 μL, of 3.2% sodium citrate. Blood was gently mixed and maintained ambient until processed. Whole blood samples were centrifuged at 2,000 g for 15 minutes under ambient conditions (20-25° C.). Plasma samples were withdrawn avoiding the cell pack and two (2) aliquots made. Any clotting in the whole blood sample or hemolysis in the plasma was noted.
[0617] Perfusion: Following exsanguination, all animals underwent cardiac perfusion with saline. In brief, whole body intracardiac perfusion was performed by inserting 23/21-gauge needle attached to 10 mL syringe containing saline into the lumen of the left ventricle for perfusion. The right atrium was incised to provide a drainage outlet for perfusate. Gentle and steady pressure was applied to the plunger to perfuse the animal after the needle has been positioned in the heart. Adequate flow of the flushing solution was ensured until the exiting perfusate flows clear (free of visible blood) indicating that the flushing solution had saturated the body and the procedure was complete.
[0618] Tissue Collection: Terminal tissues were collected from moribund animals that were euthanized prior to their scheduled time point. If possible, tissues were collected and stored from animals that were found dead.

[0619] After euthanasia and perfusion, the liver was harvested. From the liver, four (4) 25-50 mg sections were collected and weighed. Sections were snap frozen individually, stored at nominally—70° C. until shipped.

[0620] Results: FIG. 16 shows plasma FVIII concentration (IU/mL) at 7 days after administration of the LNP:ceDNAFVIII-vector 23 test article. As shown in FIG. 16, FVIII was readily detected in plasma samples from mice treated with the LNP:ceDNAFVIII-vector 23 test article, but was not observed in mice treated with vehicle only.

### REFERENCES

[0621] All publications and references, including but not limited to patents and patent applications, cited in this specification and Examples herein are incorporated by reference in their entirety as if each individual publication or reference were specifically and individually indicated to be incorporated by reference herein as being fully set forth. Any patent application to which this application claims priority is also incorporated by reference herein in the manner described above for publications and references.

The application's sequence listing, which the Patent Office published only in electronic form, follows.

SEQUENCE LISTING (398 sequences)

SEQ ID NO: 1 - DNA, 141 bp, synthetic construct
  misc_feature 1..141: note = Description of Artificial Sequence: Synthetic polynucleotide
  source 1..141: mol_type = other DNA
aggaacccctagtgatggagttggccactccctctctgcgcgctcgctcgctcactgaggccgggcgaccaaaggtcgcccgacgcccgggctttgcccgggcggcctcagtgagcgagcgagcgcgcagctgcctgcagg

SEQ ID NO: 2 - DNA, 141 bp, synthetic construct
  misc_feature 1..141: note = Description of Artificial Sequence: Synthetic polynucleotide
  source 1..141: mol_type = other DNA
cctgcaggcagctgcgcgctcgctcgctcactgaggccgcccgggcaaagcccgggcgtcgggcgacctttggtcgcccggcctcagtgagcgagcgagcgcgcagagagggagtggccaactccatcactaggggttcct

SEQ ID NO: 3 - DNA, 130 bp, synthetic construct
  misc_feature 1..130: note = Description of Artificial Sequence: Synthetic polynucleotide
  source 1..130: mol_type = other DNA
aggaacccctagtgatggagttggccactccctctctgcgcgctcgctcgctcactgaggccgggcgaccaaaggtcgcccgacgcccgggcggcctcagtgagcgagcgagcgcgcagctgcctgcagg

SEQ ID NO: 4 - DNA, 130 bp, synthetic construct
  misc_feature 1..130: note = Description of Artificial Sequence: Synthetic polynucleotide
  source 1..130: mol_type = other DNA
cctgcaggcagctgcgcgctcgctcgctcactgaggccgcccgggcgtcgggcgacctttggtcgcccggcctcagtgagcgagcgagcgcgcagagagggagtggccaactccatcactaggggttcct

SEQ ID NO: 5 - DNA, 143 bp, synthetic construct
  misc_feature 1..143: note = Description of Artificial Sequence: Synthetic polynucleotide
  source 1..143: mol_type = other DNA
ttgcccactccctctctgcgcgctcgctcgctcggtggggcctgcggaccaaaggtccgcagacggcagaggtctcctctgccggccccaccgagcgagcgacgcgcgcagagagggagtgggcaactccatcactagggtaa

SEQ ID NO: 6 - DNA, 144 bp, synthetic construct
  misc_feature 1..144: note = Description of Artificial Sequence: Synthetic polynucleotide
  source 1..144: mol_type = other DNA
ttggccactccctctatgcgcactcgctcgctcggtggggcctggcgaccaaaggtcgccagacggacgtgggtttccacgtccggccccaccgagcgagcgagtgcgcatagagggagtggccaactccatcactagaggtat

SEQ ID NO: 7 - DNA, 127 bp, synthetic construct
  misc_feature 1..127: note = Description of Artificial Sequence: Synthetic polynucleotide
  source 1..127: mol_type = other DNA
ttggccactccctctatgcgcgctcgctcactcactcggccctggagaccaaaggtctccagactgccggcctctggccggcagggccgagtgagtgagcgagcgcgcatagagggagtggccaact

SEQ ID NO: 8 - DNA, 166 bp, synthetic construct
  misc_feature 1..166: note = Description of Artificial Sequence: Synthetic polynucleotide
  source 1..166: mol_type = other DNA
tcccccctgtcgcgttcgctcgctcgctggctcgtttgggggggcgacggccagagggccgtcgtctggcagctctttgagctgccacccccccaaacgagccagcgagcgagcgaacgcgacaggggggagagtgccacactctcaagcaagggggttttgtaag

SEQ ID NO: 9 - DNA, 144 bp, synthetic construct
  misc_feature 1..144: note = Description of Artificial Sequence: Synthetic polynucleotide
  source 1..144: mol_type = other DNA
ttgcccactccctctaatgcgcgctcgctcgctcggtggggcctgcggaccaaaggtccgcagacggcagaggtctcctctgccggccccaccgagcgagcgagcgcgcatagagggagtgggcaactccatcactaggggtat

SEQ ID NO: 10 - DNA, 143 bp, synthetic construct
  misc_feature 1..143: note = Description of Artificial Sequence: Synthetic polynucleotide
  source 1..143: mol_type = other DNA
ttaccctagtgatggagttgcccactccctctctgcgcgcgtcgctcgctcggtggggccggcagaggagacctctgccgtctgcggacctttggtccgcaggccccaccgagcgagcgagcgcgcagagagggagtgggcaa

SEQ ID NO: 11 - DNA, 144 bp, synthetic construct
  misc_feature 1..144: note = Description of Artificial Sequence: Synthetic polynucleotide
  source 1..144: mol_type = other DNA
atacctctagtgatggagttggccactccctctatgcgcactcgctcgctcggtggggccggacgtggaaacccacgtccgtctggcgacctttggtcgccaggccccaccgagcgagcgagtgcgcatagagggagtggccaa

SEQ ID NO: 12 - DNA, 127 bp, synthetic construct
  misc_feature 1..127: note = Description of Artificial Sequence: Synthetic polynucleotide
  source 1..127: mol_type = other DNA
agttggccacattagctatgcgcgctcgctcactcactcggccctggagaccaaaggtctccagactgccggcctctggccggcagggccgagtgagtgagcgagcgcgcatagagggagtggccaa

SEQ ID NO: 13 - DNA, 166 bp, synthetic construct
  misc_feature 1..166: note = Description of Artificial Sequence: Synthetic polynucleotide
  source 1..166: mol_type = other DNA
cttacaaaacccccttgcttgagagtgtggcactctcccccctgtcgcgttcgctcgctcgctggctcgtttgggggggtggcagctcaaagagctgccagacgacggccctctggccgtcgcccccccaaacgagccagcgagcgagcgaacgcgacagggggga

SEQ ID NO: 14 - DNA, 144 bp, synthetic construct
  misc_feature 1..144: note = Description of Artificial Sequence: Synthetic polynucleotide
  source 1..144: mol_type = other DNA
atacccctagtgatggagttgcccactccctctatgcgcgctcgctcgctcggtggggccggcagaggagacctctgccgtctgcggacctttggtccgcaggccccaccgagcgagcgagcgcgcattagagggagtgggcaa

SEQ ID NO: 15 - DNA, 120 bp, synthetic construct
  misc_feature 1..120: note = Description of Artificial Sequence: Synthetic polynucleotide
  source 1..120: mol_type = other DNA
aggaacccctagtgatggagttggccactccctctctgcgcgctcgctcgctcactgaggcgcacgcccgggtttcccgggcggcctcagtgagcgagcgagcgcgcagctgcctgcagg

SEQ ID NO: 16 - DNA, 122 bp, synthetic construct
  misc_feature 1..122: note = Description of Artificial Sequence: Synthetic polynucleotide
  source 1..122: mol_type = other DNA
aggaacccctagtgatggagttggccactccctctctgcgcgctcgctcgctcactgaggccgacgcccgggctttgcccgggcggcctcagtgagcgagcgagcgcgcagctgcctgcagg

SEQ ID NO: 17 - DNA, 129 bp, synthetic construct
  misc_feature 1..129: note = Description of Artificial Sequence: Synthetic polynucleotide
  source 1..129: mol_type = other DNA
aggaacccctagtgatggagttggccactccctctctgcgcgctcgctcgctcactgaggccgggcgaccaaaggtcgcccgacgcccgggcgcctcagtgagcgagcgagcgcgcagctgcctgcagg

SEQ ID NO: 18 - DNA, 101 bp, synthetic construct
  misc_feature 1..101: note = Description of Artificial Sequence: Synthetic polynucleotide
  source 1..101: mol_type = other DNA
aggaacccctagtgatggagttggccactccctctctgcgcgctcgctcgctcactgaggctttgcctcagtgagcgagcgagcgcgcagctgcctgcagg

SEQ ID NO: 19 - DNA, 139 bp, synthetic construct
  misc_feature 1..139: note = Description of Artificial Sequence: Synthetic polynucleotide
  source 1..139: mol_type = other DNA
aggaacccctagtgatggagttggccactccctctctgcgcgctcgctcgctcactgaggccgggcgacaaagtcgcccgacgcccgggctttgcccgggcggcctcagtgagcgagcgagcgcgcagctgcctgcagg

SEQ ID NO: 20 - DNA, 137 bp, synthetic construct
  misc_feature 1..137: note = Description of Artificial Sequence: Synthetic polynucleotide
  source 1..137: mol_type = other DNA
aggaacccctagtgatggagttggccactccctctctgcgcgctcgctcgctcactgaggccgggcgaaaatcgcccgacgcccgggctttgcccgggcggcctcagtgagcgagcgagcgcgcagctgcctgcagg

SEQ ID NO: 21 - DNA, 135 bp, synthetic construct
  misc_feature 1..135: note = Description of Artificial Sequence: Synthetic polynucleotide
  source 1..135: mol_type = other DNA
aggaacccctagtgatggagttggccactccctctctgcgcgctcgctcgctcactgaggccgggcgaaacgcccgacgcccgggctttgcccgggcggcctcagtgagcgagcgagcgcgcagctgcctgcagg

SEQ ID NO: 22 - DNA, 133 bp, synthetic construct
  misc_feature 1..133: note = Description of Artificial Sequence: Synthetic polynucleotide
  source 1..133: mol_type = other DNA
aggaacccctagtgatggagttggccactccctctctgcgcgctcgctcgctcactgaggccgggcaaagcccgacgcccgggctttgcccgggcggcctcagtgagcgagcgagcgcgcagctgcctgcagg

SEQ ID NO: 23 - DNA, 139 bp, synthetic construct
  misc_feature 1..139: note = Description of Artificial Sequence: Synthetic polynucleotide
  source 1..139: mol_type = other DNA
aggaacccctagtgatggagttggccactccctctctgcgcgctcgctcgctcactgaggccgggcgaccaaaggtcgcccgacgcccgggtttcccgggcggcctcagtgagcgagcgagcgcgcagctgcctgcagg

SEQ ID NO: 24 - DNA, 137 bp, synthetic construct
  misc_feature 1..137: note = Description of Artificial Sequence: Synthetic polynucleotide
  source 1..137: mol_type = other DNA
aggaacccctagtgatggagttggccactccctctctgcgcgctcgctcgctcactgaggccgggcgaccaaaggtcgcccgacgcccggtttccgggcggcctcagtgagcgagcgagcgcgcagctgcctgcagg

SEQ ID NO: 25 - DNA, 135 bp, synthetic construct
  misc_feature 1..135: note = Description of Artificial Sequence: Synthetic polynucleotide
  source 1..135: mol_type = other DNA
aggaacccctagtgatggagttggccactccctctctgcgcgctcgctcgctcactgaggccgggcgaccaaaggtcgcccgacgcccgtttcgggcggcctcagtgagcgagcgagcgcgcagctgcctgcagg

SEQ ID NO: 26 - DNA, 133 bp, synthetic construct
  misc_feature 1..133: note = Description of Artificial Sequence: Synthetic polynucleotide
  source 1..133: mol_type = other DNA
aggaacccctagtgatggagttggccactccctctctgcgcgctcgctcgctcactgaggccgggcgaccaaaggtcgcccgacgccctttgggcggcctcagtgagcgagcgagcgcgcagctgcctgcagg

SEQ ID NO: 27 - DNA, 131 bp, synthetic construct
  misc_feature 1..131: note = Description of Artificial Sequence: Synthetic polynucleotide
  source 1..131: mol_type = other DNA
aggaacccctagtgatggagttggccactccctctctgcgcgctcgctcgctcactgaggccgggcgaccaaaggtcgcccgacgcctttggcggcctcagtgagcgagcgagcgcgcagctgcctgcagg

SEQ ID NO: 28 - DNA, 129 bp, synthetic construct
  misc_feature 1..129: note = Description of Artificial Sequence: Synthetic polynucleotide
  source 1..129: mol_type = other DNA
aggaacccctagtgatggagttggccactccctctctgcgcgctcgctcgctcactgaggccgggcgaccaaaggtcgcccgacgctttgcggcctcagtgagcgagcgagcgcgcagctgcctgcagg

SEQ ID NO: 29 - DNA, 127 bp, synthetic construct
  misc_feature 1..127: note = Description of Artificial Sequence: Synthetic polynucleotide
  source 1..127: mol_type = other DNA
aggaacccctagtgatggagttggccactccctctctgcgcgctcgctcgctcactgaggccgggcgaccaaaggtcgcccgacgtttcggcctcagtgagcgagcgagcgcgcagctgcctgcagg

SEQ ID NO: 30 - DNA, 122 bp, synthetic construct
  misc_feature 1..122: note = Description of Artificial Sequence: Synthetic polynucleotide
  source 1..122: mol_type = other DNA
aggaacccctagtgatggagttggccactccctctctgcgcgctcgctcgctcactgaggccgggcgaccaaaggtcgcccgacggcctcagtgagcgagcgagcgcgcagctgcctgcagg

SEQ ID NO: 31 - DNA, 130 bp, synthetic construct; identical to SEQ ID NO: 3
  misc_feature 1..130: note = Description of Artificial Sequence: Synthetic polynucleotide
  source 1..130: mol_type = other DNA

SEQ ID NO: 32 - DNA, 120 bp, synthetic construct
  misc_feature 1..120: note = Description of Artificial Sequence: Synthetic polynucleotide
  source 1..120: mol_type = other DNA
cctgcaggcagctgcgcgctcgctcgctcactgaggccgcccgggaaacccgggcgtgcgcctcagtgagcgagcgagcgcgcagagagggagtggccaactccatcactaggggttcct

SEQ ID NO: 33 - DNA, 122 bp, synthetic construct
  misc_feature 1..122: note = Description of Artificial Sequence: Synthetic polynucleotide
  source 1..122: mol_type = other DNA
cctgcaggcagctgcgcgctcgctcgctcactgaggccgtcgggcgacctttggtcgcccggcctcagtgagcgagcgagcgcgcagagagggagtggccaactccatcactaggggttcct

SEQ ID NO: 34 - DNA, 122 bp, synthetic construct
  misc_feature 1..122: note = Description of Artificial Sequence: Synthetic polynucleotide
  source 1..122: mol_type = other DNA
cctgcaggcagctgcgcgctcgctcgctcactgaggccgcccgggcaaagcccgggcgtcggcctcagtgagcgagcgagcgcgcagagagggagtggccaactccatcactaggggttcct

SEQ ID NO: 35 - DNA, 129 bp, synthetic construct
  misc_feature 1..129: note = Description of Artificial Sequence: Synthetic polynucleotide
  source 1..129: mol_type = other DNA
cctgcaggcagctgcgcgctcgctcgctcactgaggcgcccgggcgtcgggcgacctttggtcgcccggcctcagtgagcgagcgagcgcgcagagagggagtggccaactccatcactaggggttcct

SEQ ID NO: 36 - DNA, 101 bp, synthetic construct
  misc_feature 1..101: note = Description of Artificial Sequence: Synthetic polynucleotide
  source 1..101: mol_type = other DNA
cctgcaggcagctgcgcgctcgctcgctcactgaggcaaagcctcagtgagcgagcgagcgcgcagagagggagtggccaactccatcactaggggttcct

SEQ ID NO: 37 - DNA, 139 bp, synthetic construct
  misc_feature 1..139: note = Description of Artificial Sequence: Synthetic polynucleotide
  source 1..139: mol_type = other DNA
cctgcaggcagctgcgcgctcgctcgctcactgaggccgcccgggcaaagcccgggcgtcgggcgactttgtcgcccggcctcagtgagcgagcgagcgcgcagagagggagtggccaactccatcactaggggttcct

SEQ ID NO: 38 - DNA, 137 bp, synthetic construct
  misc_feature 1..137: note = Description of Artificial Sequence: Synthetic polynucleotide
  source 1..137: mol_type = other DNA
cctgcaggcagctgcgcgctcgctcgctcactgaggccgcccgggcaaagcccgggcgtcgggcgattttcgcccggcctcagtgagcgagcgagcgcgcagagagggagtggccaactccatcactaggggttcct

SEQ ID NO: 39 - DNA, 135 bp, synthetic construct
  misc_feature 1..135: note = Description of Artificial Sequence: Synthetic polynucleotide
  source 1..135: mol_type = other DNA
cctgcaggcagctgcgcgctcgctcgctcactgaggccgcccgggcaaagcccgggcgtcgggcgtttcgcccggcctcagtgagcgagcgagcgcgcagagagggagtggccaactccatcactaggggttcct

SEQ ID NO: 40 - DNA, 133 bp, synthetic construct
  misc_feature 1..133: note = Description of Artificial Sequence: Synthetic polynucleotide
  source 1..133: mol_type = other DNA
cctgcaggcagctgcgcgctcgctcgctcactgaggccgcccgggcaaagcccgggcgtcgggctttgcccggcctcagtgagcgagcgagcgcgcagagagggagtggccaactccatcactaggggttcct

SEQ ID NO: 41 - DNA, 139 bp, synthetic construct
  misc_feature 1..139: note = Description of Artificial Sequence: Synthetic polynucleotide
  source 1..139: mol_type = other DNA
cctgcaggcagctgcgcgctcgctcgctcactgaggccgcccgggaaacccgggcgtcgggcgacctttggtcgcccggcctcagtgagcgagcgagcgcgcagagagggagtggccaactccatcactaggggttcct

SEQ ID NO: 42 - DNA, 137 bp, synthetic construct
  misc_feature 1..137: note = Description of Artificial Sequence: Synthetic polynucleotide
  source 1..137: mol_type = other DNA
cctgcaggcagctgcgcgctcgctcgctcactgaggccgcccggaaaccgggcgtcgggcgacctttggtcgcccggcctcagtgagcgagcgagcgcgcagagagggagtggccaactccatcactaggggttcct

SEQ ID NO: 43 - DNA, 135 bp, synthetic construct
  misc_feature 1..135: note = Description of Artificial Sequence: Synthetic polynucleotide
  source 1..135: mol_type = other DNA
cctgcaggcagctgcgcgctcgctcgctcactgaggccgcccgaaacgggcgtcgggcgacctttggtcgcccggcctcagtgagcgagcgagcgcgcagagagggagtggccaactccatcactaggggttcct

SEQ ID NO: 44 - DNA, 133 bp, synthetic construct
  misc_feature 1..133: note = Description of Artificial Sequence: Synthetic polynucleotide
  source 1..133: mol_type = other DNA
cctgcaggcagctgcgcgctcgctcgctcactgaggccgcccaaagggcgtcgggcgacctttggtcgcccggcctcagtgagcgagcgagcgcgcagagagggagtggccaactccatcactaggggttcct

SEQ ID NO: 45 - DNA, 131 bp, synthetic construct
  misc_feature 1..131: note = Description of Artificial Sequence: Synthetic polynucleotide
  source 1..131: mol_type = other DNA
cctgcaggcagctgcgcgctcgctcgctcactgaggccgccaaaggcgtcgggcgacctttggtcgcccggcctcagtgagcgagcgagcgcgcagagagggagtggccaactccatcactaggggttcct

SEQ ID NO: 46 - DNA, 129 bp, synthetic construct
  misc_feature 1..129: note = Description of Artificial Sequence: Synthetic polynucleotide
  source 1..129: mol_type = other DNA
cctgcaggcagctgcgcgctcgctcgctcactgaggccgcaaagcgtcgggcgacctttggtcgcccggcctcagtgagcgagcgagcgcgcagagagggagtggccaactccatcactaggggttcct

SEQ ID NO: 47 - DNA, 127 bp, synthetic construct
  misc_feature 1..127: note = Description of Artificial Sequence: Synthetic polynucleotide
  source 1..127: mol_type = other DNA
cctgcaggcagctgcgcgctcgctcgctcactgaggccgaaacgtcgggcgacctttggtcgcccggcctcagtgagcgagcgagcgcgcagagagggagtggccaactccatcactaggggttcct

SEQ ID NO: 48 - DNA, 122 bp, synthetic construct; identical to SEQ ID NO: 30
  misc_feature 1..122: note = Description of Artificial Sequence: Synthetic polynucleotide
  source 1..122: mol_type = other DNA

SEQ ID NO: 49 - DNA, 12 bp, synthetic construct
  misc_feature 1..12: note = Description of Artificial Sequence: Synthetic oligonucleotide
  source 1..12: mol_type = other DNA
cgatcgttcgat

SEQ ID NO: 50 - DNA, 12 bp, synthetic construct
  misc_feature 1..12: note = Description of Artificial Sequence: Synthetic oligonucleotide
  source 1..12: mol_type = other DNA
atcgaaccatcg

SEQ ID NO: 51 - DNA, 12 bp, synthetic construct
  misc_feature 1..12: note = Description of Artificial Sequence: Synthetic oligonucleotide
  source 1..12: mol_type = other DNA
atcgaacgatcg

SEQ ID NO: 52 - DNA, 165 bp, synthetic construct
  misc_feature 1..165: note = Description of Artificial Sequence: Synthetic polynucleotide
  source 1..165: mol_type = other DNA
aggaacccctagtgatggagttggccactccctctctgcgcgctcgctcgctcactgaggccgcccgggcaaagcccgggcgtcgggcgacctttggtcgcccggcctcagtgagcgagcgagcgcgcagagagggagtggccaactccatcactaggggttcct

SEQ ID NO: 53 - DNA, 140 bp, synthetic construct
  misc_feature 1..140: note = Description of Artificial Sequence: Synthetic polynucleotide
  source 1..140: mol_type = other DNA
cccctagtgatggagttggccactccctctctgcgcgctcgctcgctcactgaggccgcccgggcaaagcccgggcgtcgggcgacctttggtcgcccggcctcagtgagcgagcgagcgcgcagagagatcactagggg

SEQ ID NO: 54 - DNA, 91 bp, synthetic construct
  misc_feature 1..91: note = Description of Artificial Sequence: Synthetic oligonucleotide
  source 1..91: mol_type = other DNA
gcgcgctcgctcgctcactgaggccgcccgggcaaagcccgggcgtcgggcgacctttggtcgcccggcctcagtgagcgagcgagcgcgc

SEQ ID NO: 55 - DNA, 91 bp, synthetic construct
  misc_feature 1..91: note = Description of Artificial Sequence: Synthetic oligonucleotide
  source 1..91: mol_type = other DNA
gcgcgctcgctcgctcactgaggccgggcgaccaaaggtcgcccgacgcccgggctttgcccgggcggcctcagtgagcgagcgagcgcgc

SEQ ID NO: 56 - DNA, 1662 bp, synthetic construct
  misc_feature 1..1662: note = Description of Artificial Sequence: Synthetic polynucleotide
  source 1..1662: mol_type = other DNA
gccgccaccatggaagacgccaaaaacataaagaaaggcccggcgccattctatccgctggaagatggaaccgctggagagcaactgcataaggctatgaagagatacgccctggttcctggaacaattgcttttacagatgcacatatcgaggtggacatcacttacgctgagtacttcgaaatgtccgttcggttggcagaagctatgaaacgatatgggctgaatacaaatcacagaatcgtcgtatgcagtgaaaactctcttcaattctttatgccggtgttgggcgcgttatttatcggagttgcagttgcgcccgcgaacgacatttataatgaacgtgaattgctcaacagtatgggcatttcgcagcctaccgtggtgttcgtttccaaaaaggggttgcaaaaaattttgaacgtgcaaaaaaagctcccaatcatccaaaaaattattatcatggattctaaaacggattaccagggatttcagtcgatgtacacgttcgtcacatctcatctacctcccggttttaatgaatacgattttgtgccagagtccttcgatagggacaagacaattgcactgatcatgaactcctctggatctactggtctgcctaaaggtgtcgctctgcctcatagaactgcctgcgtgagattctcgcatgccagagatcctatttttggcaatcaaatcattccggatactgcgattttaagtgttgttccattccatcacggttttggaatgtttactacactcggatatttgatatgtggatttcgagtcgtcttaatgtatagatttgaagaagagctgtttctgaggagccttcaggattacaagattcaaagtgcgctgctggtgccaaccctattctccttcttcgccaaaagcactctgattgacaaatacgatttatctaatttacacgaaattgcttctggtggcgctcccctctctaaggaagtcggggaagcggttgccaagaggttccatctgccaggtatcaggcaaggatatgggctcactgagactacatcagctattctgattacacccgagggggatgataaaccgggcgcggtcggtaaagttgttccattttttgaagcgaaggttgtggatctggataccgggaaaacgctgggcgttaatcaaagaggcgaactgtgtgtgagaggtcctatgattatgtccggttatgtaaacaatccggaagcgaccaacgccttgattgacaaggatggatggctacattctggagacatagcttactgggacgaagacgaacacttcttcatcgttgaccgcctgaagtctctgattaagtacaaaggctatcaggtggctcccgctgaattggaatccatcttgctccaacaccccaacatcttcgacgcaggtgtcgcaggtcttcccgacgatgacgccggtgaacttcccgccgccgttgttgttttggagcacggaaagacgatgacggaaaaagagatcgtggattacgtcgccagtcaagtaacaaccgcgaaaaagttgcgcggaggagttgtgtttgtggacgaagtaccgaaaggtcttaccggaaaactcgacgcaagaaaaatcagagagatcctcataaaggccaagaagggcggaaagatcgccgtgtaa

SEQ ID NO: 57 - protein, 453 aa, synthetic construct
  REGION 1..453: note = Description of Artificial Sequence: Synthetic polypeptide
  VARIANT 1: note = Any amino acid
XVQLVESGGGVVQPGRSLRLSCAASGFAFSSYGMHWVRQAPGKGLEWVAVIWFDGTKKYYTDSVKGRFTISRDNSKNTLYLQMNTLRAEDTAVYYCARDRGIGARRGPYYMDVWGKGTTVTVSSASTKGPSVFPLAPSSKSTSGGTAALGCLVKDYFPEPVTVSWNSGALTSGVHTFPAVLQSSGLYSLSSVVTVPSSSLGTQTYICNVNHKPSNTKVDKRVEPKSCDKTHTCPPCPAPELLGGPSVFLFPPKPKDTLMISRTPEVTCVVVDVSHEDPEVKFNWYVDGVEVHNAKTKPREEQYNSTYRVVSVLTVLHQDWLNGKEYKCKVSNKALPAPIEKTISKAKGQPREPQVYTLPPSREEMTKNQVSLTCLVKGFYPSDIAVEWESNGQPENNYKTTPPVLDSDGSFFLYSKLTVDKSRWQQGNVFSCSVMHEALHNHYTQKSLSLSPG

SEQ ID NO: 58 - protein, 214 aa, synthetic construct
  REGION 1..214: note = Description of Artificial Sequence: Synthetic polypeptide
DIQMTQSPSSLSASVGDRVTITCRASQSISSYLNWYQQKPGKAPKLLIYAASSLQSGVPSRFSGSGSGTDFTLTISSLQPEDFATYYCQQSYSTPLTFGGGTKVEIKRTVAAPSVFIFPPSDEQLKSGTASVVCLLNNFYPREAKVQWKVDNALQSGNSQESVTEQDSKDSTYSLSSTLTLSKADYEKHKVYACEVTHQGLSSPVTKSFNRGEC

SEQ ID NO: 59 - DNA, 1310 bp, synthetic construct
  misc_feature 1..1310: note = Description of Artificial Sequence: Synthetic polynucleotide
  source 1..1310: mol_type = other DNA
ggagccgagagtaattcatacaaaaggagggatcgccttcgcaaggggagagcccagggaccgtccctaaattctcacagacccaaatccctgtagccgccccacgacagcgcgaggagcatgcgctcagggctgagcgcggggagagcagagcacacaagctcatagaccctggtcgtgggggggaggaccggggagctggcgcggggcaaactgggaaagcggtgtcgtgtgctggctccgccctcttcccgagggtgggggagaacggtatataagtgcggcagtcgccttggacgttctttttcgcaacgggtttgccgtcagaacgcaggtgaggggcgggtgtggcttccgcgggccgccgagctggaggtcctgctccgagcgggccgggccccgctgtcgtcggcggggattagctgcgagcattcccgcttcgagttgcgggcggcgcgggaggcagagtgcgaggcctagcggcaaccccgtagcctcgcctcgtgtccggcttgaggcctagcgtggtgtccgcgccgccgccgcgtgctactccggccgcactctggtcttttttttttttgttgttgttgccctgctgccttcgattgccgttcagcaataggggctaacaaagggagggtgcggggcttgctcgcccggagcccggagaggtcatggttggggaggaatggagggacaggagtggcggctggggcccgcccgccttcggagcacatgtccgacgccacctggatggggcgaggcctggggtttttcccgaagcaaccaggctggggttagcgtgccgaggccatgtggccccagcacccggcacgatctggcttggcggcgccgcgttgccctgcctccctaactagggtgaggccatcccgtccggcaccagttgcgtgcgtggaaagatggccgctcccgggccctgttgcaaggagctcaaaatggaggacgcggcagcccggtggagcgggcgggtgagtcacccacacaaaggaagagggcctggtccctcaccggctgctgcttcctgtgaccccgtggtcctatcggccgcaatagtcacctcgggcttttgagcacggctagtcgcggcggggggaggggatgtaatggcgttggagtttgttcacatttggtgggtggagactagtcaggccagcctggcgctggaagtcatttttggaatttgtccccttgagttttgagcggagctaattctcgggcttcttagcggttcaaaggtatcttttaaacccttttttaggtgttgtgaaaaccaccgctaattcaaa

SEQ ID NO: 60 - DNA, 16 bp, synthetic construct
  misc_feature 1..16: note = Description of Artificial Sequence: Synthetic oligonucleotide
  source 1..16: mol_type = other DNA
gcgcgctcgctcgctc

SEQ ID NO: 61-66 - skipped (6 entries)

SEQ ID NO: 67 - DNA, 581 bp, synthetic construct
  misc_feature 1..581: note = Description of Artificial Sequence: Synthetic polynucleotide
  source 1..581: mol_type = other DNA
gagcatcttaccgccatttattcccatatttgttctgtttttcttgatttgggtatacatttaaatgttaataaaacaaaatggtggggcaatcatttacatttttagggatatgtaattactagttcaggtgtattgccacaagacaaacatgttaagaaactttcccgttatttacgctctgttcctgttaatcaacctctggattacaaaatttgtgaaagattgactgatattcttaactatgttgctccttttacgctgtgtggatatgctgctttatagcctctgtatctagctattgcttcccgtacggctttcgttttctcctccttgtataaatcctggttgctgtctcttttagaggagttgtggcccgttgtccgtcaacgtggcgtggtgtgctctgtgtttgctgacgcaacccccactggctggggcattgccaccacctgtcaactcctttctgggactttcgctttccccctcccgatcgccacggcagaactcatcgccgcctgccttgcccgctgctggacaggggctaggttgctgggcactgataattccgtggtgttgtc

SEQ ID NO: 68 - DNA, 225 bp, synthetic construct
  misc_feature 1..225: note = Description of Artificial Sequence: Synthetic polynucleotide
  source 1..225: mol_type = other DNA
tgtgccttctagttgccagccatctgttgtttgcccctcccccgtgccttccttgaccctggaaggtgccactcccactgtcctttcctaataaaatgaggaaattgcatcgcattgtctgagtaggtgtcattctattctggggggtggggtggggcaggacagcaagggggaggattgggaagacaatagcaggcatgctggggatgcggtgggctctatggc

SEQ ID NO: 69-70 - skipped (2 entries)

SEQ ID NO: 71 - DNA, 16 bp, synthetic construct
  misc_feature 1..16: note = Description of Artificial Sequence: Synthetic oligonucleotide
  source 1..16: mol_type = other DNA
gagcgagcgagcgcgc

SEQ ID NO: 72 - DNA, 1923 bp, synthetic construct
  misc_feature 1..1923: note = Description of Artificial Sequence: Synthetic polynucleotide
  source 1..1923: mol_type = other DNA
tcaatattggccattagccatattattcattggttatatagcataaatcaatattggctattggccattgcatacgttgtatctatatcataatatgtacatttatattggctcatgtccaatatgaccgccatgttggcattgattattgactagttattaatagtaatcaattacggggtcattagttcatagcccatatatggagttccgcgttacataacttacggtaaatggcccgcctggctgaccgcccaacgacccccgcccattgacgtcaataatgacgtatgttcccatagtaacgccaatagggactttccattgacgtcaatgggtggagtatttacggtaaactgcccacttggcagtacatcaagtgtatcatatgccaagtccgccccctattgacgtcaatgacggtaaatggcccgcctggcattatgcccagtacatgaccttacgggactttcctacttggcagtacatctacgtattagtcatcgctattaccatggtcgaggtgagccccacgttctgcttcactctccccatctcccccccctccccacccccaattttgtatttatttattttttaattattttgtgcagcgatgggggcggggggggggggggggcgcgcgccaggcggggcggggcggggcgaggggcggggcggggcgaggcggagaggtgcggcggcagccaatcagagcggcgcgctccgaaagtttccttttatggcgaggcggcggcggcggcggccctataaaaagcgaagcgcgcggcgggcgggagtcgctgcgacgctgccttcgccccgtgccccgctccgccgccgcctcgcgccgcccgccccggctctgactgaccgcgttactcccacaggtgagcgggcgggacggcccttctcctccgggctgtaattagcgcttggtttaatgacggcttgtttcttttctgtggctgcgtgaaagccttgaggggctccgggagggccctttgtgcgggggggagcggctcggggggtgcgtgcgtgtgtgtgtgcgtggggagcgccgcgtgcggcccgcgctgcccggcggctgtgagcgctgcgggcgcggcgcggggctttgtgcgctccgcagtgtgcgcgaggggagcgcggccgggggcggtgccccgcggtgcggggggggctgcgaggggaacaaaggctgcgtgcggggtgtgtgcgtgggggggtgagcagggggtgtgggcgcggcggtcgggctgtaacccccccctgcacccccctccccgagttgctgagcacggcccggcttcgggtgcggggctccgtacggggcgtggcgcggggctcgccgtgccgggcggggggtggcggcaggtgggggtgccgggcggggcggggccgcctcgggccggggagggctcgggggaggggcgcggcggcccccggagcgccggcggctgtcgaggcgcggcgagccgcagccattgccttttatggtaatcgtgcgagagggcgcagggacttcctttgtcccaaatctgtgcggagccgaaatctgggaggcgccgccgcaccccctctagcgggcgcggggcgaagcggtgcggcgccggcaggaaggaaatgggcggggagggccttcgtgcgtcgccgcgccgccgtccccttctccctctccagcctcggggctgtccgcggggggacggctgccttcgggggggacggggcagggcggggttcggcttctggcgtgtgaccggcggctctagagcctctgctaaccatgttttagccttcttctttttcctacagctcctgggcaacgtgctggttattgtgctgtctcatcatttgtcgacagaattcctcgaagatccgaaggggttcaagcttggcattccggtactgttggtaaagcca

SEQ ID NO: 73 - DNA, 1272 bp, synthetic construct
  misc_feature 1..1272: note = Description of Artificial Sequence: Synthetic polynucleotide
  source 1..1272: mol_type = other DNA
aggctcagaggcacacaggagtttctgggctcaccctgcccccttccaacccctcagttcccatcctccagcagctgtttgtgtgctgcctctgaagtccacactgaacaaacttcagcctactcatgtccctaaaatgggcaaacattgcaagcagcaaacagcaaacacacagccctccctgcctgctgaccttggagctggggcagaggtcagagacctctctgggcccatgccacctccaacatccactcgaccccttggaatttcggtggagaggagcagaggttgtcctggcgtggtttaggtagtgtgagagggtccgggttcaaaaccacttgctgggtggggagtcgtcagtaagtggctatgccccgaccccgaagcctgtttccccatctgtacaatggaaatgataaagacgcccatctgatagggtttttgtggcaaataaacatttggtttttttgttttgttttgttttgttttttgagatggaggtttgctctgtcgcccaggctggagtgcagtgacacaatctcatctcaccacaaccttcccctgcctcagcctcccaagtagctgggattacaagcatgtgccaccacacctggctaattttctatttttagtagagacgggtttctccatgttggtcagcctcagcctcccaagtaactgggattacaggcctgtgccaccacacccggctaattttttctatttttgacagggacggggtttcaccatgttggtcaggctggtctagaggtaccggatcttgctaccagtggaacagccactaaggattctgcagtgagagcagagggccagctaagtggtactctcccagagactgtctgactcacgccaccccctccaccttggacacaggacgctgtggtttctgagccaggtacaatgactcctttcggtaagtgcagtggaagctgtacactgcccaggcaaagcgtccgggcagcgtaggcgggcgactcagatcccagccagtggacttagcccctgtttgctcctccgataactggggtgaccttggttaatattcaccagcagcctcccccgttgcccctctggatccactgcttaaatacggacgaggacagggccctgtctcctcagcttcaggcaccaccactgacctgggacagtgaatccggactctaaggtaaatataaaatttttaagtgtataatgtgttaaactactgattctaattgtttctctcttttagattccaacctttggaactga

SEQ ID NO: 74 - DNA, 1177 bp, synthetic construct
  misc_feature 1..1177: note = Description of Artificial Sequence: Synthetic polynucleotide
  source 1..1177: mol_type = other DNA
ggctcagaggctcagaggcacacaggagtttctgggctcaccctgcccccttccaacccctcagttcccatcctccagcagctgtttgtgtgctgcctctgaagtccacactgaacaaacttcagcctactcatgtccctaaaatgggcaaacattgcaagcagcaaacagcaaacacacagccctccctgcctgctgaccttggagctggggcagaggtcagagacctctctgggcccatgccacctccaacatccactcgaccccttggaatttcggtggagaggagcagaggttgtcctggcgtggtttaggtagtgtgagagggtccgggttcaaaaccacttgctgggtggggagtcgtcagtaagtggctatgccccgaccccgaagcctgtttccccatctgtacaatggaaatgataaagacgcccatctgatagggtttttgtggcaaataaacatttggtttttttgttttgttttgttttgttttttgagatggaggtttgctctgtcgcccaggctggagtgcagtgacacaatctcatctcaccacaaccttcccctgcctcagcctcccaagtagctgggattacaagcatgtgccaccacacctggctaattttctatttttagtagagacgggtttctccatgttggtcagcctcagcctcccaagtaactgggattacaggcctgtgccaccacacccggctaattttttctatttttgacagggacggggtttcaccatgttggtcaggctggtctagaggtaccggatcttgctaccagtggaacagccactaaggattctgcagtgagagcagagggccagctaagtggtactctcccagagactgtctgactcacgccaccccctccaccttggacacaggacgctgtggtttctgagccaggtacaatgactcctttcggtaagtgcagtggaagctgtacactgcccaggcaaagcgtccgggcagcgtaggcgggcgactcagatcccagccagtggacttagcccctgtttgctcctccgataactggggtgaccttggttaatattcaccagcagcctcccccgttgcccctctggatccactgcttaaatacggacgaggacagggccctgtctcctcagcttcaggcaccaccactgacctgggacagt

SEQ ID NO: 75 - DNA, 547 bp, synthetic construct
  misc_feature 1..547: note = Description of Artificial Sequence: Synthetic polynucleotide
  source 1..547: mol_type = other DNA
ccctaaaatgggcaaacattgcaagcagcaaacagcaaacacacagccctccctgcctgctgaccttggagctggggcagaggtcagagacctctctgggcccatgccacctccaacatccactcgaccccttggaatttttcggtggagaggagcagaggttgtcctggcgtggtttaggtagtgtgagaggggaatgactcctttcggtaagtgcagtggaagctgtacactgcccaggcaaagcgtccgggcagcgtaggcgggcgactcagatcccagccagtggacttagcccctgtttgctcctccgataactggggtgaccttggttaatattcaccagcagcctcccccgttgcccctctggatccactgcttaaatacggacgaggacagggccctgtctcctcagcttcaggcaccaccactgacctgggacagtgaatccggactctaaggtaaatataaaatttttaagtgtataatgtgttaaactactgattctaattgtttctctcttttagattccaacctttggaactga

SEQ ID NO: 76 - DNA, 556 bp, synthetic construct
  misc_feature 1..556: note = Description of Artificial Sequence: Synthetic polynucleotide
  source 1..556: mol_type = other DNA
ccctaaaatgggcaaacattgcaagcagcaaacagcaaacacacagccctccctgcctgctgaccttggagctggggcagaggtcagagacctctctgggcccatgccacctccaacatccactcgaccccttggaatttcggtggagaggagcagaggttgtcctggcgtggtttaggtagtgtgagaggggaatgactcctttcggtaagtgcagtggaagctgtacactgcccaggcaaagcgtccgggcagcgtaggcgggcgactcagatcccagccagtggacttagcccctgtttgctcctccgataactggggtgaccttggttaatattcaccagcagcctcccccgttgcccctctggatccactgcttaaatacggacgaggacactcgagggccctgtctcctcagcttcaggcaccaccactgacctgggacagtgaatccggacatcgattctaaggtaaatataaaatttttaagtgtataatttgttaaactactgattctaattgtttctctcttttagattccaacctttggaactga

SEQ ID NO: 77 - DNA, 1179 bp, synthetic construct
  misc_feature 1..1179: note = Description of Artificial Sequence: Synthetic polynucleotide
  source 1..1179: mol_type = other DNA
ggctccggtgcccgtcagtgggcagagcgcacatcgcccacagtccccgagaagttggggggaggggtcggcaattgaaccggtgcctagagaaggtggcgcggggtaaactgggaaagtgatgtcgtgtactggctccgcctttttcccgagggtgggggagaaccgtatataagtgcagtagtcgccgtgaacgttctttttcgcaacgggtttgccgccagaacacaggtaagtgccgtgtgtggttcccgcgggcctggcctctttacgggttatggcccttgcgtgccttgaattacttccacctggctgcagtacgtgattcttgatcccgagcttcgggttggaagtgggtgggagagttcgaggccttgcgcttaaggagccccttcgcctcgtgcttgagttgaggcctggcctgggcgctggggccgccgcgtgcgaatctggtggcaccttcgcgcctgtctcgctgctttcgataagtctctagccatttaaaatttttgatgacctgctgcgacgctttttttctggcaagatagtcttgtaaatgcgggccaagatctgcacactggtatttcggtttttggggccgcgggcggcgacggggcccgtgcgtcccagcgcacatgttcggcgaggcggggcctgcgagcgcggccaccgagaatcggacgggggtagtctcaagctggccggcctgctctggtgcctggtctcgcgccgccgtgtatcgccccgccctgggcggcaaggctggcccggtcggcaccagttgcgtgagcggaaagatggccgcttcccggccctgctgcagggagctcaaaatggaggacgcggcgctcgggagagcgggcgggtgagtcacccacacaaaggaaaagggcctttccgtcctcagccgtcgcttcatgtgactccacggagtaccgggcgccgtccaggcacctcgattagttctcgagcttttggagtacgtcgtctttaggttggggggaggggttttatgcgatggagtttccccacactgagtgggtggagactgaagttaggccagcttggcacttgatgtaattctccttggaatttgccctttttgagtttggatcttggttcattctcaagcctcagacagtggttcaaagtttttttcttccatttcaggtgtcgtga

SEQ ID NO: 78 - DNA, 141 bp, synthetic construct
  misc_feature 1..141: note = Description of Artificial Sequence: Synthetic polynucleotide
  source 1..141: mol_type = other DNA
aataaacgataacgccgttggtggcgtgaggcatgtaaaaggttacatcattatcttgttcgccatccggttggtataaatagacgttcatgttggtttttgtttcagttgcaagttggctgcggcgcgcgcagcaccttt

SEQ ID NO: 79 - DNA, 317 bp, synthetic construct
  misc_feature 1..317: note = Description of Artificial Sequence: Synthetic polynucleotide
  source 1..317: mol_type = other DNA
ggtgtggaaagtccccaggctccccagcaggcagaagtatgcaaagcatgcatctcaattagtcagcaaccaggtgtggaaagtccccaggctccccagcaggcagaagtatgcaaagcatgcatctcaattagtcagcaaccatagtcccgcccctaactccgcccatcccgcccctaactccgcccagttccgcccattctccgccccatggctgactaattttttttatttatgcagaggccgaggccgcctcggcctctgagctattccagaagtagtgaggaggcttttttggaggcctaggcttttgcaaa

SEQ ID NO: 80 - DNA, 241 bp, synthetic construct
  misc_feature 1..241: note = Description of Artificial Sequence: Synthetic polynucleotide
  source 1..241: mol_type = other DNA
gagggcctatttcccatgattccttcatatttgcatatacgatacaaggctgttagagagataattggaattaatttgactgtaaacacaaagatattagtacaaaatacgtgacgtagaaagtaataatttcttgggtagtttgcagttttaaaattatgttttaaaatggactatcatatgcttaccgtaacttgaaagtatttcgatttcttggctttatatatcttgtggaaaggac

SEQ ID NO: 81 - DNA, 215 bp, synthetic construct
  misc_feature 1..215: note = Description of Artificial Sequence: Synthetic polynucleotide
  source 1..215: mol_type = other DNA
gaacgctgacgtcatcaacccgctccaaggaatcgcgggcccagtgtcactaggcgggaacacccagcgcgcgtgcgccctggcaggaagatggctgtgagggacaggggagtggcgccctgcaatatttgcatgtcgctatgtgttctgggaaatcaccataaacgtgaaatgtctttggatttgggaatcgtataagaactgtatgagaccac

SEQ ID NO: 82 - DNA, 546 bp, synthetic construct
  misc_feature 1..546: note = Description of Artificial Sequence: Synthetic polynucleotide
  source 1..546: mol_type = other DNA
ccctaaaatgggcaaacattgcaagcagcaaacagcaaacacacagccctccctgcctgctgaccttggagctggggcagaggtcagagacctctctgggcccatgccacctccaacatccactcgaccccttggaatttttcggtggagaggagcagaggttgtcctggcgtggtttaggtagtgtgagaggggaatgactcctttcggtaagtgcagtggaagctgtacactgcccaggcaaagcgtccgggcagcgtaggcgggcgactcagatcccagccagtggacttagcccctgtttgctcctccgataactggggtgaccttggttaatattcaccagcagcctcccccgttgcccctctggatccactgcttaaatacggacgaggacagggccctgtctcctcagcttcaggcaccaccactgacctgggacagtgaatccggactctaaggtaaatataaaatttttaagtgtataatgtgttaaactactgattctaattgtttctctcttttagattccaacctttggaactg

SEQ ID NO: 83 - DNA, 576 bp, synthetic construct
  misc_feature 1..576: note = Description of Artificial Sequence: Synthetic polynucleotide
  source 1..576: mol_type = other DNA
tagtaatcaattacggggtcattagttcatagcccatatatggagttccgcgttacataacttacggtaaatggcccgcctggctgaccgcccaacgacccccgcccattgacgtcaataatgacgtatgttcccatagtaacgccaatagggactttccattgacgtcaatgggtggagtatttacggtaaactgcccacttggcagtacatcaagtgtatcatatgccaagtacgccccctattgacgtcaatgacggtaaatggcccgcctggcattatgcccagtacatgaccttatgggactttcctacttggcagtacatctacgtattagtcatcgctattaccatggtgatgcggttttggcagtacatcaatgggcgtggatagcggtttgactcacggggatttccaagtctccaccccattgacgtcaatgggagtttgttttggcaccaaaatcaacgggactttccaaaatgtcgtaacaactccgccccattgacgcaaatgggcggtaggcgtgtacggtgggaggtctatataagcagagctggtttagtgaaccgtcag

SEQ ID NO: 84 - DNA, 150 bp, synthetic construct
  misc_feature 1..150: note = Description of Artificial Sequence: Synthetic polynucleotide
  source 1..150: mol_type = other DNA
ataaacgataacgccgttggtggcgtgaggcatgtaaaaggttacatcattatcttgttcgccatccggttggtataaatagacgttcatgttggtttttgtttcagttgcaagttggctgcggcgcgcgcagcacctttgcggccatct

SEQ ID NO: 85 - DNA, 1313 bp, synthetic construct
  misc_feature 1..1313: note = Description of Artificial Sequence: Synthetic polynucleotide
  source 1..1313: mol_type = other DNA
ggagccgagagtaattcatacaaaaggagggatcgccttcgcaaggggagagcccagggaccgtccctaaattctcacagacccaaatccctgtagccgccccacgacagcgcgaggagcatgcgcccagggctgagcgcgggtagatcagagcacacaagctcacagtccccggcggtggggggaggggcgcgctgagcgggggccagggagctggcgcggggcaaactgggaaagtggtgtcgtgtgctggctccgccctcttcccgagggtgggggagaacggtatataagtgcggtagtcgccttggacgttctttttcgcaacgggtttgccgtcagaacgcaggtgagtggcgggtgtggcttccgcgggccccggagctggagccctgctctgagcgggccgggctgatatgcgagtgtcgtccgcagggtttagctgtgagcattcccacttcgagtggcgggcggtgcgggggtgagagtgcgaggcctagcggcaaccccgtagcctcgcctcgtgtccggcttgaggcctagcgtggtgtccgccgccgcgtgccactccggccgcactatgcgttttttgtccttgctgccctcgattgccttccagcagcatgggctaacaaagggagggtgtggggctcactcttaaggagcccatgaagcttacgttggataggaatggaagggcaggaggggcgactggggcccgcccgccttcggagcacatgtccgacgccacctggatggggcgaggcctgtggctttccgaagcaatcgggcgtgagtttagcctacctgggccatgtggccctagcactgggcacggtctggcctggcggtgccgcgttcccttgcctcccaacaagggtgaggccgtcccgcccggcaccagttgcttgcgcggaaagatggccgctcccggggccctgttgcaaggagctcaaaatggaggacgcggcagcccggtggagcgggcgggtgagtcacccacacaaaggaagagggccttgcccctcgccggccgctgcttcctgtgaccccgtggtctatcggccgcatagtcacctcgggcttctcttgagcaccgctcgtcgcggcggggggaggggatctaatggcgttggagtttgttcacatttggtgggtggagactagtcaggccagcctggcgctggaagtcattcttggaatttgcccctttgagtttggagcgaggctaattctcaagcctcttagcggttcaaaggtattttctaaacccgtttccaggtgttgtgaaagccaccgctaattcaaagcaa

SEQ ID NO: 86 - DNA, 213 bp, synthetic construct
  misc_feature 1..213: note = Description of Artificial Sequence: Synthetic polynucleotide
  source 1..213: mol_type = other DNA
taagatacattgatgagtttggacaaaccacaactagaatgcagtgaaaaaaatgctttatttgtgaaatttgtgatgctattgctttatttgtaaccattataagctgcaataaacaagttaacaacaacaattgcattcattttatgtttcaggttcagggggaggtgtgggaggttttttaaagcaagtaaaacctctacaaatgtggta

SEQ ID NO: 87 - protein, 7 aa, synthetic construct
  REGION 1..7: note = Description of Artificial Sequence: Synthetic peptide
PKKKRKV

SEQ ID NO: 88 - protein, 19 aa, synthetic construct
  REGION 1..19: note = Description of Artificial Sequence: Synthetic peptide
MDWTWRILFLVAAATGAHS

SEQ ID NO: 89 - protein, 19 aa, synthetic construct
  REGION 1..19: note = Description of Artificial Sequence: Synthetic peptide
MLPSQLIGFLLLWVPASRG

SEQ ID NO: 90 - protein, 7 aa, Simian virus 40
PKKKRKV

SEQ ID NO: 91 - DNA, 21 bp, Simian virus 40
  source 1..21: mol_type = genomic DNA
cccaagaagaagaggaaggtg

SEQ ID NO: 92 - protein, 16 aa, unidentified
  REGION 1..16: note = Description of Unknown: Nucleoplasmin bipartite NLS sequence
KRPAATKKAGQAKKKK

SEQ ID NO: 93 - protein, 9 aa, unidentified
  REGION 1..9: note = Description of Unknown: C-myc NLS sequence
PAAKRVKLD

SEQ ID NO: 94 - protein, 11 aa, unidentified
  REGION 1..11: note = Description of Unknown: C-myc NLS sequence
RQRRNELKRSP

SEQ ID NO: 95 - protein, 38 aa, Homo sapiens
NQSSNFGPMKGGNFGGRSSGPYGGGGQYFAKPRNQGGY

SEQ ID NO: 96 - protein, 42 aa, unidentified
  REGION 1..42: note = Description of Unknown: IBB domain from importin-alpha sequence
RMRIZFKNKGKDTAELRRRRVEVSVELRKAKKDEQILKRRNV

SEQ ID NO: 97 - protein, 8 aa, unidentified
  REGION 1..8: note = Description of Unknown: Myoma T protein sequence
VSRKRPRP

SEQ ID NO: 98 - protein, 8 aa, unidentified
  REGION 1..8: note = Description of Unknown: Myoma T protein sequence
PPKKARED

SEQ ID NO: 99 - protein, 8 aa, Homo sapiens
PQPKKKPL

SEQ ID NO: 100 - protein, 12 aa, Mus musculus
SALIKKKKKMAP

SEQ ID NO: 101 - DNA, 70 bp, synthetic construct
  misc_feature 1..70: note = Description of Artificial Sequence: Synthetic oligonucleotide
  source 1..70: mol_type = other DNA
gcgcgctcgctcgctcactgaggccgcccgggaaacccgggcgtgcgcctcagtgagcgagcgagcgcgc

SEQ ID NO: 102 - DNA, 70 bp, synthetic construct
  misc_feature 1..70: note = Description of Artificial Sequence: Synthetic oligonucleotide
  source 1..70: mol_type = other DNA
gcgcgctcgctcgctcactgaggcgcacgcccgggtttcccgggcggcctcagtgagcgagcgagcgcgc

SEQ ID NO: 103 - DNA, 72 bp, synthetic construct
  misc_feature 1..72: note = Description of Artificial Sequence: Synthetic oligonucleotide
  source 1..72: mol_type = other DNA
gcgcgctcgctcgctcactgaggccgtcgggcgacctttggtcgcccggcctcagtgagcgagcgagcgcgc

SEQ ID NO: 104 - DNA, 72 bp, synthetic construct
  misc_feature 1..72: note = Description of Artificial Sequence: Synthetic oligonucleotide
  source 1..72: mol_type = other DNA
gcgcgctcgctcgctcactgaggccgggcgaccaaaggtcgcccgacggcctcagtgagcgagcgagcgcgc

SEQ ID NO: 105 - DNA, 72 bp, synthetic construct
  misc_feature 1..72: note = Description of Artificial Sequence: Synthetic oligonucleotide
  source 1..72: mol_type = other DNA
gcgcgctcgctcgctcactgaggccgcccgggcaaagcccgggcgtcggcctcagtgagcgagcgagcgcgc

SEQ ID NO: 106 - DNA, 72 bp, synthetic construct
  misc_feature 1..72: note = Description of Artificial Sequence: Synthetic oligonucleotide
  source 1..72: mol_type = other DNA
gcgcgctcgctcgctcactgaggccgacgcccgggctttgcccgggcggcctcagtgagcgagcgagcgcgc

SEQ ID NO: 107 - DNA, 83 bp, synthetic construct
  misc_feature 1..83: note = Description of Artificial Sequence: Synthetic oligonucleotide
  source 1..83: mol_type = other DNA
gcgcgctcgctcgctcactgaggccgcccgggcaaagcccgggcgtcgggctttgcccggcctcagtgagcgagcgagcgcgc

SEQ ID NO: 108 - DNA, 83 bp, synthetic construct
  misc_feature 1..83: note = Description of Artificial Sequence: Synthetic oligonucleotide
  source 1..83: mol_type = other DNA
gcgcgctcgctcgctcactgaggccgggcaaagcccgacgcccgggctttgcccgggcggcctcagtgagcgagcgagcgcgc

SEQ ID NO: 109 - DNA, 77 bp, synthetic construct
  misc_feature 1..77: note = Description of Artificial Sequence: Synthetic oligonucleotide
  source 1..77: mol_type = other DNA
gcgcgctcgctcgctcactgaggccgaaacgtcgggcgacctttggtcgcccggcctcagtgagcgagcgagcgcgc

SEQ ID NO: 110 - DNA, 77 bp, synthetic construct
  misc_feature 1..77: note = Description of Artificial Sequence: Synthetic oligonucleotide
  source 1..77: mol_type = other DNA
gcgcgctcgctcgctcactgaggccgggcgaccaaaggtcgcccgacgtttcggcctcagtgagcgagcgagcgcgc

SEQ ID NO: 111 - DNA, 51 bp, synthetic construct
  misc_feature 1..51: note = Description of Artificial Sequence: Synthetic oligonucleotide
  source 1..51: mol_type = other DNA
gcgcgctcgctcgctcactgaggcaaagcctcagtgagcgagcgagcgcgc

SEQ ID NO: 112 - DNA, 51 bp, synthetic construct
  misc_feature 1..51: note = Description of Artificial Sequence: Synthetic oligonucleotide
  source 1..51: mol_type = other DNA
gcgcgctcgctcgctcactgaggctttgcctcagtgagcgagcgagcgcgc

SEQ ID NO: 113 - DNA, 80 bp, synthetic construct
  misc_feature 1..80: note = Description of Artificial Sequence: Synthetic oligonucleotide
  source 1..80: mol_type = other DNA
gcgcgctcgctcgctcactgaggccgcccgggcgtcgggcgacctttggtcgcccggcctcagtgagcgagcgagcgcgc

SEQ ID NO: 114 - DNA, 80 bp, synthetic construct
  misc_feature 1..80: note = Description of Artificial Sequence: Synthetic oligonucleotide
  source 1..80: mol_type = other DNA
gcgcgctcgctcgctcactgaggccgggcgaccaaaggtcgcccgacgcccgggcggcctcagtgagcgagcgagcgcgc

SEQ ID NO: 115 - DNA, 79 bp, synthetic construct
  misc_feature 1..79: note = Description of Artificial Sequence: Synthetic oligonucleotide
  source 1..79: mol_type = other DNA
gcgcgctcgctcgctcactgaggcgcccgggcgtcgggcgacctttggtcgcccggcctcagtgagcgagcgagcgcgc

SEQ ID NO: 116 - DNA, 79 bp, synthetic construct
  misc_feature 1..79: note = Description of Artificial Sequence: Synthetic oligonucleotide
  source 1..79: mol_type = other DNA
gcgcgctcgctcgctcactgaggccgggcgaccaaaggtcgcccgacgcccgggcgcctcagtgagcgagcgagcgcgc

SEQ ID NO: 117 - protein, 5 aa, Influenza virus
DRLRR

SEQ ID NO: 118 - protein, 7 aa, Influenza virus
PKQKKRK

SEQ ID NO: 119 - protein, 10 aa, Hepatitis delta virus
RKLKKKIKKL

SEQ ID NO: 120 - protein, 10 aa, Mus musculus
REKKKFLKRR

SEQ ID NO: 121 - protein, 20 aa, Homo sapiens
KRKGDEVDGVDEVAKKKSKK

SEQ ID NO: 122 - protein, 17 aa, Homo sapiens
RKCLQAGMNLEARKTKK

SEQ ID NO: 123-124 - skipped (2 entries)

SEQ ID NO: 125 - DNA, 141 bp, synthetic construct; identical to SEQ ID NO: 78
  misc_feature 1..141: note = Description of Artificial Sequence: Synthetic polynucleotide
  source 1..141: mol_type = other DNA

SEQ ID NO: 126 - DNA, 317 bp, synthetic construct; identical to SEQ ID NO: 79
  misc_feature 1..317: note = Description of Artificial Sequence: Synthetic polynucleotide
  source 1..317: mol_type = other DNA

SEQ ID NO: 127 - DNA, 72 bp, synthetic construct; identical to SEQ ID NO: 104
  misc_feature 1..72: note = Description of Artificial Sequence: Synthetic oligonucleotide
  source 1..72: mol_type = other DNA

SEQ ID NO: 128 - DNA, 60 bp, synthetic construct
  misc_feature 1..60: note = Description of Artificial Sequence: Synthetic oligonucleotide
  source 1..60: mol_type = other DNA
gagacagacacactcctgctatgggtactgctgctctgggttccaggttccactggtgac

SEQ ID NO: 129 - DNA, 1260 bp, Adeno-associated virus - 2
  source 1..1260: mol_type = genomic DNA
atggagctggtcgggtggctcgtggacaaggggattacctcggagaagcagtggatccaggaggaccaggcctcatacatctccttcaatgcggcctccaactcgcggtcccaaatcaaggctgccttggacaatgcgggaaagattatgagcctgactaaaaccgcccccgactacctggtgggccagcagcccgtggaggacatttccagcaatcggatttataaaattttggaactaaacgggtacgatccccaatatgcggcttccgtctttctgggatgggccacgaaaaagttcggcaagaggaacaccatctggctgtttgggcctgcaactaccgggaagaccaacatcgcggaggccatagcccacactgtgcccttctacgggtgcgtaaactggaccaatgagaactttcccttcaacgactgtgtcgacaagatggtgatctggtgggaggaggggaagatgaccgccaaggtcgtggagtcggccaaagccattctcggaggaagcaaggtgcgcgtggaccagaaatgcaagtcctcggcccagatagacccgactcccgtgatcgtcacctccaacaccaacatgtgcgccgtgattgacgggaactcaacgaccttcgaacaccagcagccgttgcaagaccggatgttcaaatttgaactcacccgccgtctggatcatgactttgggaaggtcaccaagcaggaagtcaaagactttttccggtgggcaaaggatcacgtggttgaggtggagcatgaattctacgtcaaaaagggtggagccaagaaaagacccgcccccagtgacgcagatataagtgagcccaaacgggtgcgcgagtcagttgcgcagccatcgacgtcagacgcggaagcttcgatcaactacgcagacaggtaccaaaacaaatgttctcgtcacgtgggcatgaatctgatgctgtttccctgcagacaatgcgagagaatgaatcagaattcaaatatctgcttcactcacggacagaaagactgtttagagtgctttcccgtgtcagaatctcaacccgtttctgtcgtcaaaaaggcgtatcagaaactgtgctacattcatcatatcatgggaaaggtgccagacgcttgcactgcctgcgatctggtcaatgtggatttggatgactgcatctttgaacaataaatgatttaaatcaggtatggctgccgatggttatcttccagattggctcgaggacactctctctga

SEQ ID NO: 130 - DNA, 1932 bp, Adeno-associated virus - 2
  source 1..1932: mol_type = genomic DNA
atgccggggttttacgagattgtgattaaggtccccagcgaccttgacgagcatctgcccggcatttctgacagctttgtgaactgggtggccgagaaggaatgggagttgccgccagattctgacatggatctgaatctgattgagcaggcacccctgaccgtggccgagaagctgcagcgcgactttctgacggaatggcgccgtgtgagtaaggccccggaggcccttttctttgtgcaatttgagaagggagagagctacttccacatgcacgtgctcgtggaaaccaccggggtgaaatccatggttttgggacgtttcctgagtcagattcgcgaaaaactgattcagagaatttaccgcgggatcgagccgactttgccaaactggttcgcggtcacaaagaccagaaatggcgccggaggcgggaacaaggtggtggatgagtgctacatccccaattacttgctccccaaaacccagcctgagctccagtgggcgtggactaatatggaacagtatttaagcgcctgtttgaatctcacggagcgtaaacggttggtggcgcagcatctgacgcacgtgtcgcagacgcaggagcagaacaaagagaatcagaatcccaattctgatgcgccggtgatcagatcaaaaacttcagccaggtacatggagctggtcgggtggctcgtggacaaggggattacctcggagaagcagtggatccaggaggaccaggcctcatacatctccttcaatgcggcctccaactcgcggtcccaaatcaaggctgccttggacaatgcgggaaagattatgagcctgactaaaaccgcccccgactacctggtgggccagcagcccgtggaggacatttccagcaatcggatttataaaattttggaactaaacgggtacgatccccaatatgcggcttccgtctttctgggatgggccacgaaaaagttcggcaagaggaacaccatctggctgtttgggcctgcaactaccgggaagaccaacatcgcggaggccatagcccacactgtgcccttctacgggtgcgtaaactggaccaatgagaactttcccttcaacgactgtgtcgacaagatggtgatctggtgggaggaggggaagatgaccgccaaggtcgtggagtcggccaaagccattctcggaggaagcaaggtgcgcgtggaccagaaatgcaagtcctcggcccagatagacccgactcccgtgatcgtcacctccaacaccaacatgtgcgccgtgattgacgggaactcaacgaccttcgaacaccagcagccgttgcaagaccggatgttcaaatttgaactcacccgccgtctggatcatgactttgggaaggtcaccaagcaggaagtcaaagactttttccggtgggcaaaggatcacgtggttgaggtggagcatgaattctacgtcaaaaagggtggagccaagaaaagacccgcccccagtgacgcagatataagtgagcccaaacgggtgcgcgagtcagttgcgcagccatcgacgtcagacgcggaagcttcgatcaactacgcagacaggtaccaaaacaaatgttctcgtcacgtgggcatgaatctgatgctgtttccctgcagacaatgcgagagaatgaatcagaattcaaatatctgcttcactcacggacagaaagactgtttagagtgctttcccgtgtcagaatctcaacccgtttctgtcgtcaaaaaggcgtatcagaaactgtgctacattcatcatatcatgggaaaggtgccagacgcttgcactgcctgcgatctggtcaatgtggatttggatgactgcatctttgaacaataaatgatttaaatcaggtatggctgccgatggttatcttccagattggctcgaggacactctctctga

SEQ ID NO: 131 - DNA, 1876 bp, synthetic construct
  misc_feature 1..1876: note = Description of Artificial Sequence: Synthetic polynucleotide
  source 1..1876: mol_type = other DNA
cgcagccaccatggcggggttttacgagattgtgattaaggtccccagcgaccttgacgggcatctgcccggcatttctgacagctttgtgaactgggtggccgagaaggaatgggagttgccgccagattctgacatggatctgaatctgattgagcaggcacccctgaccgtggccgagaagctgcagcgcgactttctgacggaatggcgccgtgtgagtaaggccccggaggcccttttctttgtgcaatttgagaagggagagagctacttccacatgcacgtgctcgtggaaaccaccggggtgaaatccatggttttgggacgtttcctgagtcagattcgcgaaaaactgattcagagaatttaccgcgggatcgagccgactttgccaaactggttcgcggtcacaaagaccagaaatggcgccggaggcgggaacaaggtggtggatgagtgctacatccccaattacttgctccccaaaacccagcctgagctccagtgggcgtggactaatatggaacagtatttaagcgcctgtttgaatctcacggagcgtaaacggttggtggcgcagcatctgacgcacgtgtcgcagacgcaggagcagaacaaagagaatcagaatcccaattctgatgcgccggtgatcagatcaaaaacttcagccaggtacatggagctggtcgggtggctcgtggacaaggggattacctcggagaagcagtggatccaggaggaccaggcctcatacatctccttcaatgcggcctccaactcgcggtcccaaatcaaggctgccttggacaatgcgggaaagattatgagcctgactaaaaccgcccccgactacctggtgggccagcagcccgtggaggacatttccagcaatcggatttataaaattttggaactaaacgggtacgatccccaatatgcggcttccgtctttctgggatgggccacgaaaaagttcggcaagaggaacaccatctggctgtttgggcctgcaactaccgggaagaccaacatcgcggaggccatagcccacactgtgcccttctacgggtgcgtaaactggaccaatgagaactttcccttcaacgactgtgtcgacaagatggtgatctggtgggaggaggggaagatgaccgccaaggtcgtggagtcggccaaagccattctcggaggaagcaaggtgcgcgtggaccagaaatgcaagtcctcggcccagatagacccgactcccgtgatcgtcacctccaacaccaacatgtgcgccgtgattgacgggaactcaacgaccttcgaacaccagcagccgttgcaagaccggatgttcaaatttgaactcacccgccgtctggatcatgactttgggaaggtcaccaagcaggaagtcaaagactttttccggtgggcaaaggatcacgtggttgaggtggagcatgaattctacgtcaaaaagggtggagccaagaaaagacccgcccccagtgacgcagatataagtgagcccaaacgggtgcgcgagtcagttgcgcagccatcgacgtcagacgcggaagcttcgatcaactacgcagacaggtaccaaaacaaatgttctcgtcacgtgggcatgaatctgatgctgtttccctgcagacaatgcgagagaatgaatcagaattcaaatatctgcttcactcacggacagaaagactgtttagagtgctttcccgtgtcagaatctcaacccgtttctgtcgtcaaaaaggcgtatcagaaactgtgctacattcatcatatcatgggaaaggtgccagacgcttgcactgcctgcgatctggtcaatgtggatttggatgactgcatctttgaacaataa

SEQ ID NO: 132 - DNA, 1194 bp, synthetic construct
  misc_feature 1..1194: note = Description of Artificial Sequence: Synthetic polynucleotide
  source 1..1194: mol_type = other DNA
atggagctggtcgggtggctcgtggacaaggggattacctcggagaagcagtggatccaggaggaccaggcctcatacatctccttcaatgcggcctccaactcgcggtcccaaatcaaggctgccttggacaatgcgggaaagattatgagcctgactaaaaccgcccccgactacctggtgggccagcagcccgtggaggacatttccagcaatcggatttataaaattttggaactaaacgggtacgatccccaatatgcggcttccgtctttctgggatgggccacgaaaaagttcggcaagaggaacaccatctggctgtttgggcctgcaactaccgggaagaccaacatcgcggaggccatagcccacactgtgcccttctacgggtgcgtaaactggaccaatgagaactttcccttcaacgactgtgtcgacaagatggtgatctggtgggaggaggggaagatgaccgccaaggtcgtggagtcggccaaagccattctcggaggaagcaaggtgcgcgtggaccagaaatgcaagtcctcggcccagatagacccgactcccgtgatcgtcacctccaacaccaacatgtgcgccgtgattgacgggaactcaacgaccttcgaacaccagcagccgttgcaagaccggatgttcaaatttgaactcacccgccgtctggatcatgactttgggaaggtcaccaagcaggaagtcaaagactttttccggtgggcaaaggatcacgtggttgaggtggagcatgaattctacgtcaaaaagggtggagccaagaaaagacccgcccccagtgacgcagatataagtgagcccaaacgggtgcgcgagtcagttgcgcagccatcgacgtcagacgcggaagcttcgatcaactacgcagaccgctaccaaaacaaatgttctcgtcacgtgggcatgaatctgatgctgtttccctgcagacaatgcgagagaatgaatcagaattcaaatatctgcttcactcacggacagaaagactgtttagagtgctttcccgtgtcagaatctcaacccgtttctgtcgtcaaaaaggcgtatcagaaactgtgctacattcatcatatcatgggaaaggtgccagacgcttgcactgcctgcgatctggtcaatgtggatttggatgactgcatctttgaacaataa

SEQ ID NO: 133 - DNA, 1876 bp, synthetic construct; identical to SEQ ID NO: 131
  misc_feature 1..1876: note = Description of Artificial Sequence: Synthetic polynucleotide
  source 1..1876: mol_type = other DNA

SEQ ID NO: 134 - DNA, 51 bp, synthetic construct
  misc_feature 1..51: note = Description of Artificial Sequence: Synthetic oligonucleotide
  source 1..51: mol_type = other DNA
ctaggccgcccgggcaaagcccgggcgtcgggcgacctttggtcgcccggc

SEQ ID NO: 135 - DNA, 65 bp, synthetic construct
  misc_feature 1..65: note = Description of Artificial Sequence: Synthetic oligonucleotide
  source 1..65: mol_type = other DNA
ctaggactgaggccgcccgggcaaagcccgggcgtcgggcgacctttggtcgcccggcctcagtc

SEQ ID NO: 136 - DNA, 67 bp, synthetic construct
  misc_feature 1..67: note = Description of Artificial Sequence: Synthetic oligonucleotide
  source 1..67: mol_type = other DNA
ggactgaggccgcccgggcaaagcccgggcgtcgggcgacctttggtcgcccggcctcagtcctgca

SEQ ID NO: 137 - DNA, 41 bp, synthetic construct
  misc_feature 1..41: note = Description of Artificial Sequence: Synthetic oligonucleotide
  source 1..41: mol_type = other DNA
gtgcgggcgaccaaaggtcgcccgacgcccgggcgcactca

SEQ ID NO: 138 - DNA, 56 bp, synthetic construct
  misc_feature 1..56: note = Description of Artificial Sequence: Synthetic oligonucleotide
  source 1..56: mol_type = other DNA
ggactgaggccgggcgaccaaaggtcgcccgacgcccgggcggcctcagtcctgca

SEQ ID NO: 139 - DNA, 54 bp, synthetic construct
  misc_feature 1..54: note = Description of Artificial Sequence: Synthetic oligonucleotide
  source 1..54: mol_type = other DNA
ctaggactgaggccgcccgggcgtcgggcgacctttggtcgcccggcctcagtc

SEQ ID NO: 140 - DNA, 48 bp, synthetic construct
  misc_feature 1..48: note = Description of Artificial Sequence: Synthetic oligonucleotide
  source 1..48: mol_type = other DNA
ggactgaggccgggcgaccaaaggtcgcccgacggcctcagtcctgca

SEQ ID NO: 141 - DNA, 46 bp, synthetic construct
  misc_feature 1..46: note = Description of Artificial Sequence: Synthetic oligonucleotide
  source 1..46: mol_type = other DNA
ctaggactgaggccgtcgggcgacctttggtcgcccggcctcagtc

SEQ ID NO: 142 - DNA, 67 bp, synthetic construct
  misc_feature 1..67: note = Description of Artificial Sequence: Synthetic oligonucleotide
  source 1..67: mol_type = other DNA
ggactgaggcccgggcgaccaaaggtcgcccgacgcccgggctttgcccgggcgcctcagtcctgca

SEQ ID NO: 143 - DNA, 47 bp, synthetic construct
  misc_feature 1..47: note = Description of Artificial Sequence: Synthetic oligonucleotide
  source 1..47: mol_type = other DNA
atacctaggcacgcgtgttactagttattaatagtaatcaattacgg

SEQ ID NO: 144 - DNA, 29 bp, synthetic construct
  misc_feature 1..29: note = Description of Artificial Sequence: Synthetic oligonucleotide
  source 1..29: mol_type = other DNA
atacctaggggccgcacgcgtgttactag

SEQ ID NO: 145 - DNA, 42 bp, synthetic construct
  misc_feature 1..42: note = Description of Artificial Sequence: Synthetic oligonucleotide
  source 1..42: mol_type = other DNA
atacactcagtgcctgcaggcacgtggtccggagatccagac

SEQ ID NO: 146 - DNA, 3754 bp, synthetic construct
  misc_feature 1..3754: note = Description of Artificial Sequence: Synthetic polynucleotide
  source 1..3754: mol_type = other DNA
cctaggtgagcgagcgagcgcgcagagagggagtggccaactccatcactaggggttccttgtagttaatgattaacccgccatgctacttatcgcggccgctcaatattggccattagccatattattcattggttatatagcataaatcaatattggctattggccattgcatacgttgtatctatatcataatatgtacatttatattggctcatgtccaatatgaccgccatgttggcattgattattgactagttattaatagtaatcaattacggggtcattagttcatagcccatatatggagttccgcgttacataacttacggtaaatggcccgcctggctgaccgcccaacgacccccgcccattgacgtcaataatgacgtatgttcccatagtaacgccaatagggactttccattgacgtcaatgggtggagtatttacggtaaactgcccacttggcagtacatcaagtgtatcatatgccaagtccgccccctattgacgtcaatgacggtaaatggcccgcctggcattatgcccagtacatgaccttacgggactttcctacttggcagtacatctacgtattagtcatcgctattaccatggtcgaggtgagccccacgttctgcttcactctccccatctcccccccctccccacccccaattttgtatttatttattttttaattattttgtgcagcgatgggggcggggggggggggggggcgcgcgccaggcggggcggggcggggcgaggggcggggcggggcgaggcggagaggtgcggcggcagccaatcagagcggcgcgctccgaaagtttccttttatggcgaggcggcggcggcggcggccctataaaaagcgaagcgcgcggcgggcgggagtcgctgcgacgctgccttcgccccgtgccccgctccgccgccgcctcgcgccgcccgccccggctctgactgaccgcgttactcccacaggtgagcgggcgggacggcccttctcctccgggctgtaattagcgcttggtttaatgacggcttgtttcttttctgtggctgcgtgaaagccttgaggggctccgggagggccctttgtgcgggggggagcggctcggggggtgcgtgcgtgtgtgtgtgcgtggggagcgccgcgtgcggcccgcgctgcccggcggctgtgagcgctgcgggcgcggcgcggggctttgtgcgctccgcagtgtgcgcgaggggagcgcggccgggggcggtgccccgcggtgcggggggggctgcgaggggaacaaaggctgcgtgcggggtgtgtgcgtgggggggtgagcagggggtgtgggcgcggcggtcgggctgtaacccccccctgcacccccctccccgagttgctgagcacggcccggcttcgggtgcggggctccgtacggggcgtggcgcggggctcgccgtgccgggcggggggtggcggcaggtgggggtgccgggcggggcggggccgcctcgggccggggagggctcgggggaggggcgcggcggcccccggagcgccggcggctgtcgaggcgcggcgagccgcagccattgccttttatggtaatcgtgcgagagggcgcagggacttcctttgtcccaaatctgtgcggagccgaaatctgggaggcgccgccgcaccccctctagcgggcgcggggcgaagcggtgcggcgccggcaggaaggaaatgggcggggagggccttcgtgcgtcgccgcgccgccgtccccttctccctctccagcctcggggctgtccgcggggggacggctgccttcgggggggacggggcagggcggggttcggcttctggcgtgtgaccggcggctctagagcctctgctaaccatgttttagccttcttctttttcctacagctcctgggcaacgtgctggttattgtgctgtctcatcatttgtcgacagaattcctcgaagatccgaaggggttcaagcttggcattccggtactgttggtaaagccagtttaaacgccgccaccatggtgagcaagggcgaggagctgttcaccggggtggtgcccatcctggtcgagctggacggcgacgtaaacggccacaagttcagcgtgtccggcgagggcgagggcgatgccacctacggcaagctgaccctgaagttcatctgcaccaccggcaagctgcccgtgccctggcccaccctcgtgaccaccctgacctacggcgtgcagtgcttcagccgctaccccgaccacatgaagcagcacgacttcttcaagtccgccatgcccgaaggctacgtccaggagcgcaccatcttcttcaaggacgacggcaactacaagacccgcgccgaggtgaagttcgagggcgacaccctggtgaaccgcatcgagctgaagggcatcgacttcaaggaggacggcaacatcctggggcacaagctggagtacaactacaacagccacaacgtctatatcatggccgacaagcagaagaacggcatcaaggtgaacttcaagatccgccacaacatcgaggacggcagcgtgcagctcgccgaccactaccagcagaacacccccatcggcgacggccccgtgctgctgcccgacaaccactacctgagcacccagtccgccctgagcaaagaccccaacgagaagcgcgatcacatggtcctgctggagttcgtgaccgccgccgggatcactctcggcatggacgagctgtacaagtaattaattaagagcatcttaccgccatttattcccatatttgttctgtttttcttgatttgggtatacatttaaatgttaataaaacaaaatggtggggcaatcatttacatttttagggatatgtaattactagttcaggtgtattgccacaagacaaacatgttaagaaactttcccgttatttacgctctgttcctgttaatcaacctctggattacaaaatttgtgaaagattgactgatattcttaactatgttgctccttttacgctgtgtggatatgctgctttatagcctctgtatctagctattgcttcccgtacggctttcgttttctcctccttgtataaatcctggttgctgtctcttttagaggagttgtggcccgttgtccgtcaacgtggcgtggtgtgctctgtgtttgctgacgcaacccccactggctggggcattgccaccacctgtcaactcctttctgggactttcgctttccccctcccgatcgccacggcagaactcatcgccgcctgccttgcccgctgctggacaggggctaggttgctgggcactgataattccgtggtgttgtctgtgccttctagttgccagccatctgttgtttgcccctcccccgtgccttccttgaccctggaaggtgccactcccactgtcctttcctaataaaatgaggaaattgcatcgcattgtctgagtaggtgtcattctattctggggggtggggtggggcaggacagcaagggggaggattgggaagacaatagcaggcatgctggggatgcggtgggctctatggctctagagcatggctacgtagataagtagcatggcgggttaatcattaactacacctgcagcaggaacccctagtgatggagttggccactccctctctgcgcgctcgctcgctccctgcaggactgaggccgggcgaccaaaggtcgcccgacgcccgggcggcctcagtcctgcagg

SEQ ID NO: 147 - DNA, 8418 bp, synthetic construct
  misc_feature 1..8418: note = Description of Artificial Sequence: Synthetic polynucleotide
  source 1..8418: mol_type = other DNA
ggcagctgcgcgctcgctcgctcacctaggccgcccgggcaaagcccgggcgtcgggcgacctttggtcgcccggcctaggtgagcgagcgagcgcgcagagagggagtggccaactccatcactaggggttccttgtagttaatgattaacccgccatgctacttatcgcggccgctcaatattggccattagccatattattcattggttatatagcataaatcaatattggctattggccattgcatacgttgtatctatatcataatatgtacatttatattggctcatgtccaatatgaccgccatgttggcattgattattgactagttattaatagtaatcaattacggggtcattagttcatagcccatatatggagttccgcgttacataacttacggtaaatggcccgcctggctgaccgcccaacgacccccgcccattgacgtcaataatgacgtatgttcccatagtaacgccaatagggactttccattgacgtcaatgggtggagtatttacggtaaactgcccacttggcagtacatcaagtgtatcatatgccaagtccgccccctattgacgtcaatgacggtaaatggcccgcctggcattatgcccagtacatgaccttacgggactttcctacttggcagtacatctacgtattagtcatcgctattaccatggtcgaggtgagccccacgttctgcttcactctccccatctcccccccctccccacccccaattttgtatttatttattttttaattattttgtgcagcgatgggggcggggggggggggggggcgcgcgccaggcggggcggggcggggcgaggggcggggcggggcgaggcggagaggtgcggcggcagccaatcagagcggcgcgctccgaaagtttccttttatggcgaggcggcggcggcggcggccctataaaaagcgaagcgcgcggcgggcgggagtcgctgcgacgctgccttcgccccgtgccccgctccgccgccgcctcgcgccgcccgccccggctctgactgaccgcgttactcccacaggtgagcgggcgggacggcccttctcctccgggctgtaattagcgcttggtttaatgacggcttgtttcttttctgtggctgcgtgaaagccttgaggggctccgggagggccctttgtgcgggggggagcggctcggggggtgcgtgcgtgtgtgtgtgcgtggggagcgccgcgtgcggcccgcgctgcccggcggctgtgagcgctgcgggcgcggcgcggggctttgtgcgctccgcagtgtgcgcgaggggagcgcggccgggggcggtgccccgcggtgcggggggggctgcgaggggaacaaaggctgcgtgcggggtgtgtgcgtgggggggtgagcagggggtgtgggcgcggcggtcgggctgtaacccccccctgcacccccctccccgagttgctgagcacggcccggcttcgggtgcggggctccgtacggggcgtggcgcggggctcgccgtgccgggcggggggtggcggcaggtgggggtgccgggcggggcggggccgcctcgggccggggagggctcgggggaggggcgcggcggcccccggagcgccggcggctgtcgaggcgcggcgagccgcagccattgccttttatggtaatcgtgcgagagggcgcagggacttcctttgtcccaaatctgtgcggagccgaaatctgggaggcgccgccgcaccccctctagcgggcgcggggcgaagcggtgcggcgccggcaggaaggaaatgggcggggagggccttcgtgcgtcgccgcgccgccgtccccttctccctctccagcctcggggctgtccgcggggggacggctgccttcgggggggacggggcagggcggggttcggcttctggcgtgtgaccggcggctctagagcctctgctaaccatgttttagccttcttctttttcctacagctcctgggcaacgtgctggttattgtgctgtctcatcatttgtcgacagaattcctcgaagatccgaaggggttcaagcttggcattccggtactgttggtaaagccagtttaaacgccgccaccatggtgagcaagggcgaggagctgttcaccggggtggtgcccatcctggtcgagctggacggcgacgtaaacggccacaagttcagcgtgtccggcgagggcgagggcgatgccacctacggcaagctgaccctgaagttcatctgcaccaccggcaagctgcccgtgccctggcccaccctcgtgaccaccctgacctacggcgtgcagtgcttcagccgctaccccgaccacatgaagcagcacgacttcttcaagtccgccatgcccgaaggctacgtccaggagcgcaccatcttcttcaaggacgacggcaactacaagacccgcgccgaggtgaagttcgagggcgacaccctggtgaaccgcatcgagctgaagggcatcgacttcaaggaggacggcaacatcctggggcacaagctggagtacaactacaacagccacaacgtctatatcatggccgacaagcagaagaacggcatcaaggtgaacttcaagatccgccacaacatcgaggacggcagcgtgcagctcgccgaccactaccagcagaacacccccatcggcgacggccccgtgctgctgcccgacaaccactacctgagcacccagtccgccctgagcaaagaccccaacgagaagcgcgatcacatggtcctgctggagttcgtgaccgccgccgggatcactctcggcatggacgagctgtacaagtaattaattaagagcatcttaccgccatttattcccatatttgttctgtttttcttgatttgggtatacatttaaatgttaataaaacaaaatggtggggcaatcatttacatttttagggatatgtaattactagttcaggtgtattgccacaagacaaacatgttaagaaactttcccgttatttacgctctgttcctgttaatcaacctctggattacaaaatttgtgaaagattgactgatattcttaactatgttgctccttttacgctgtgtggatatgctgctttatagcctctgtatctagctattgcttcccgtacggctttcgttttctcctccttgtataaatcctggttgctgtctcttttagaggagttgtggcccgttgtccgtcaacgtggcgtggtgtgctctgtgtttgctgacgcaacccccactggctggggcattgccaccacctgtcaactcctttctgggactttcgctttccccctcccgatcgccacggcagaactcatcgccgcctgccttgcccgctgctggacaggggctaggttgctgggcactgataattccgtggtgttgtctgtgccttctagttgccagccatctgttgtttgcccctcccccgtgccttccttgaccctggaaggtgccactcccactgtcctttcctaataaaatgaggaaattgcatcgcattgtctgagtaggtgtcattctattctggggggtggggtggggcaggacagcaagggggaggattgggaagacaatagcaggcatgctggggatgcggtgggctctatggctctagagcatggctacgtagataagtagcatggcgggttaatcattaactacacctgcagcaggaacccctagtgatggagttggccactccctctctgcgcgctcgctcgctccctgcaggactgaggccgggcgaccaaaggtcgcccgacgcccgggcggcctcagtcctgcagggagcgagcgagcgcgcagctgcctgcacgggcgcgccggtaccgggagatgggggaggctaactgaaacacggaaggagacaataccggaaggaacccgcgctatgacggcaataaaaagacagaataaaacgcacgggtgttgggtcgtttgttcataaacgcggggttcggtcccagggctggcactctgtcgataccccaccgagaccccattgggaccaatacgcccgcgtttcttccttttccccaccccaacccccaagttcgggtgaaggcccagggctcgcagccaacgtcggggcggcaagccctgccatagccactacgggtacgtaggccaaccactagaactatagctagagtcctgggcgaacaaacgatgctcgccttccagaaaaccgaggatgcgaaccacttcatccggggtcagcaccaccggcaagcgccgcgacggccgaggtctaccgatctcctgaagccagggcagatccgtgcacagcaccttgccgtagaagaacagcaaggccgccaatgcctgacgatgcgtggagaccgaaaccttgcgctcgttcgccagccaggacagaaatgcctcgacttcgctgctgcccaaggttgccgggtgacgcacaccgtggaaacggatgaaggcacgaacccagttgacataagcctgttcggttcgtaaactgtaatgcaagtagcgtatgcgctcacgcaactggtccagaaccttgaccgaacgcagcggtggtaacggcgcagtggcggttttcatggcttgttatgactgtttttttgtacagtctatgcctcgggcatccaagcagcaagcgcgttacgccgtgggtcgatgtttgatgttatggagcagcaacgatgttacgcagcagcaacgatgttacgcagcagggcagtcgccctaaaacaaagttaggtggctcaagtatgggcatcattcgcacatgtaggctcggccctgaccaagtcaaatccatgcgggctgctcttgatcttttcggtcgtgagttcggagacgtagccacctactcccaacatcagccggactccgattacctcgggaacttgctccgtagtaagacattcatcgcgcttgctgccttcgaccaagaagcggttgttggcgctctcgcggcttacgttctgcccaggtttgagcagccgcgtagtgagatctatatctatgatctcgcagtctccggcgagcaccggaggcagggcattgccaccgcgctcatcaatctcctcaagcatgaggccaacgcgcttggtgcttatgtgatctacgtgcaagcagattacggtgacgatcccgcagtggctctctatacaaagttgggcatacgggaagaagtgatgcactttgatatcgacccaagtaccgccacctaacaattcgttcaagccgagatcggcttcccggccgcggagttgttcggtaaattgtcacaacgccgcgaatatagtctttaccatgcccttggccacgcccctctttaatacgacgggcaatttgcacttcagaaaatgaagagtttgctttagccataacaaaagtccagtatgctttttcacagcataactggactgatttcagtttacaactattctgtctagtttaagactttattgtcatagtttagatctattttgttcagtttaagactttattgtccgcccacacccgcttacgcagggcatccatttattactcaaccgtaaccgattttgccaggttacgcggctggtctgcggtgtgaaataccgcacagatgcgtaaggagaaaataccgcatcaggcgctcttccgcttcctcgctcactgactcgctgcgctcggtcgttcggctgcggcgagcggtatcagctcactcaaaggcggtaatacggttatccacagaatcaggggataacgcaggaaagaacatgtgagcaaaaggccagcaaaaggccaggaaccgtaaaaaggccgcgttgctggcgtttttccataggctccgcccccctgacgagcatcacaaaaatcgacgctcaagtcagaggtggcgaaacccgacaggactataaagataccaggcgtttccccctggaagctccctcgtgcgctctcctgttccgaccctgccgcttaccggatacctgtccgcctttctcccttcgggaagcgtggcgctttctcaatgctcacgctgtaggtatctcagttcggtgtaggtcgttcgctccaagctgggctgtgtgcacgaaccccccgttcagcccgaccgctgcgccttatccggtaactatcgtcttgagtccaacccggtaagacacgacttatcgccactggcagcagccactggtaacaggattagcagagcgaggtatgtaggcggtgctacagagttcttgaagtggtggcctaactacggctacactagaaggacagtatttggtatctgcgctctgctgaagccagttaccttcggaaaaagagttggtagctcttgatccggcaaacaaaccaccgctggtagcggtggtttttttgtttgcaagcagcagattacgcgcagaaaaaaaggatctcaagaagatcctttgatcttttctacggggtctgacgctcagtggaacgaaaactcacgttaagggattttggtcatgagattatcaaaaaggatcttcacctagatccttttaaattaaaaatgaagttttaaatcaatctaaagtatatatgagtaaacttggtctgacagttaccaatgcttaatcagtgaggcacctatctcagcgatctgtctatttcgttcatccatagttgcctgactccccgtcgtgtagataactacgatacgggagggcttaccatctggccccagtgctgcaatgataccgcgagacccacgctcaccggctccagatttatcagcaataaaccagccagccggaagggccgagcgcagaagtggtcctgcaactttatccgcctccatccagtctattaattgttgccgggaagctagagtaagtagttcgccagttaatagtttgcgcaacgttgttgccattgctacaggcatcgtggtgtcacgctcgtcgtttggtatggcttcattcagctccggttcccaacgatcaaggcgagttacatgatcccccatgttgtgcaaaaaagcggttagctccttcggtcctccgatcgttgtcagaagtaagttggccgcagtgttatcactcatggttatggcagcactgcataattctcttactgtcatgccatccgtaagatgcttttctgtgactggtgagtactcaaccaagtcattctgagaatagtgtatgcggcgaccgagttgctcttgcccggcgtcaatacgggataataccgcgccacatagcagaactttaaaagtgctcatcattggaaaacgttcttcggggcgaaaactctcaaggatcttaccgctgttgagatccagttcgatgtaacccactcgtgcacccaactgatcttcagcatcttttactttcaccagcgtttctgggtgagcaaaaacaggaaggcaaaatgccgcaaaaaagggaataagggcgacacggaaatgttgaatactcatactcttcctttttcaatattattgaagcatttatcagggttattgtctcatgagcggatacatatttgaatgtatttagaaaaataaacaaataggggttccgcgcacatttccccgaaaagtgccacctgaaattgtaaacgttaatattttgttaaaattcgcgttaaatttttgttaaatcagctcattttttaaccaataggccgaaatcggcaaaatcccttataaatcaaaagaatagaccgagatagggttgagtgttgttccagtttggaacaagagtccactattaaagaacgtggactccaacgtcaaagggcgaaaaaccgtctatcagggcgatggcccactacgtgaaccatcaccctaatcaagttttttggggtcgaggtgccgtaaagcactaaatcggaaccctaaagggagcccccgatttagagcttgacggggaaagccggcgaacgtggcgagaaaggaagggaagaaagcgaaaggagcgggcgctagggcgctggcaagtgtagcggtcacgctgcgcgtaaccaccacacccgccgcgcttaatgcgccgctacagggcgcgtcccattcgccattcaggctgcaaataagcgttgatattcagtcaattacaaacattaataacgaagagatgacagaaaaattttcattctgtgacagagaaaaagtagccgaagatgacggtttgtcacatggagttggcaggatgtttgattaaaaacataacaggaagaaaaatgccccgctgtgggcggacaaaatagttgggaactgggaggggtggaaatggagtttttaaggattatttagggaagagtgacaaaatagatgggaactgggtgtagcgtcgtaagctaatacgaaaattaaaaatgacaaaatagtttggaactagatttcacttatctggttcggatctcctagtgagctccctgca

SEQ ID NO: 148 - DNA, 225 bp, synthetic construct; identical to SEQ ID NO: 68
  misc_feature 1..225: note = Description of Artificial Sequence: Synthetic polynucleotide
  source 1..225: mol_type = other DNA

SEQ ID NO: 149 - DNA, 1177 bp, synthetic construct; identical to SEQ ID NO: 74
  misc_feature 1..1177: note = Description of Artificial Sequence: Synthetic polynucleotide
  source 1..1177: mol_type = other DNA

SEQ ID NO: 150 - DNA, 1326 bp, synthetic construct
  misc_feature 1..1326: note = Description of Artificial Sequence: Synthetic polynucleotide
  source 1..1326: mol_type = other DNA
ctgcagggcccactagtggagccgagagtaattcatacaaaaggagggatcgccttcgcaaggggagagcccagggaccgtccctaaattctcacagacccaaatccctgtagccgccccacgacagcgcgaggagcatgcgcccagggctgagcgcgggtagatcagagcacacaagctcacagtccccggcggtggggggaggggcgcgctgagcgggggccagggagctggcgcggggcaaactgggaaagtggtgtcgtgtgctggctccgccctcttcccgagggtgggggagaacggtatataagtgcggtagtcgccttggacgttctttttcgcaacgggtttgccgtcagaacgcaggtgagtggcgggtgtggcttccgcgggccccggagctggagccctgctctgagcgggccgggctgatatgcgagtgtcgtccgcagggtttagctgtgagcattcccacttcgagtggcgggcggtgcgggggtgagagtgcgaggcctagcggcaaccccgtagcctcgcctcgtgtccggcttgaggcctagcgtggtgtccgccgccgcgtgccactccggccgcactatgcgttttttgtccttgctgccctcgattgccttccagcagcatgggctaacaaagggagggtgtggggctcactcttaaggagcccatgaagcttacgttggataggaatggaagggcaggaggggcgactggggcccgcccgccttcggagcacatgtccgacgccacctggatggggcgaggcctgtggctttccgaagcaatcgggcgtgagtttagcctacctgggccatgtggccctagcactgggcacggtctggcctggcggtgccgcgttcccttgcctcccaacaagggtgaggccgtcccgcccggcaccagttgcttgcgcggaaagatggccgctcccggggccctgttgcaaggagctcaaaatggaggacgcggcagcccggtggagcgggcgggtgagtcacccacacaaaggaagagggccttgcccctcgccggccgctgcttcctgtgaccccgtggtctatcggccgcatagtcacctcgggcttctcttgagcaccgctcgtcgcggcggggggaggggatctaatggcgttggagtttgttcacatttggtgggtggagactagtcaggccagcctggcgctggaagtcattcttggaatttgcccctttgagtttggagcgaggctaattctcaagcctcttagcggttcaaaggtattttctaaacccgtttccaggtgttgtgaaagccaccgctaattcaaa

SEQ ID NO: 151 - DNA, 573 bp, Mus musculus
  source 1..573: mol_type = genomic DNA
gtaagagttttatgttttttcatctctgcttgtatttttctagtaatggaagcctggtattttaaaatagttaaattttcctttagtgctgatttctagattattattactgttgttgttgttattattgtcattatttgcatctgagaacccttaggtggttatattattgatatatttttggtatctttgatgacaataatgggggattttgaaagcttagctttaaatttcttttaattaaaaaaaaatgctaggcagaatgactcaaattacgttggatacagttgaatttattacggtctcatagggcctgcctgctcgaccatgctatactaaaaattaaaagtgtgtgttactaattttataaatggagtttccatttatatttacctttatttcttatttaccattgtcttagtagatatttacaaacatgacagaaacactaaatcttgagtttgaatgcacagatataaacacttaacgggttttaaaaataataatgttggtgaaaaaatataactttgagtgtagcagagaggaaccattgccaccttcagattttcctgt

SEQ ID NO: 152 - DNA, 1993 bp, Mus musculus
  source 1..1993: mol_type = genomic DNA
acgatcgggaactggcatcttcagggagtagcttaggtcagtgaagagaagaacaaaaagcagcatattacagttagttgtcttcatcaatctttaaatatgttgtgtggtttttctctccctgtttccacagacaagagtgagatcgcccatcggtataatgatttgggagaacaacatttcaaaggcctgtaagttataatgctgaaagcccacttaatatttctggtagtattagttaaagttttaaaacacctttttccaccttgagtgtgagaattgtagagcagtgctgtccagtagaaatgtgtgcattgacagaaagactgtggatctgtgctgagcaatgtggcagccagagatcacaaggctatcaagcactttgcacatggcaagtgtaactgagaagcacacattcaaataatagttaattttaattgaatgtatctagccatgtgtggctagtagctcctttcctggagagagaatctggagcccacatctaacttgttaagtctggaatcttattttttatttctggaaaggtctatgaactatagttttgggggcagctcacttactaacttttaatgcaataagatctcatggtatcttgagaacattattttgtctctttgtagtactgaaaccttatacatgtgaagtaaggggtctatacttaagtcacatctccaaccttagtaatgttttaatgtagtaaaaaaatgagtaattaatttatttttagaaggtcaatagtatcatgtattccaaataacagaggtatatggttagaaaagaaacaattcaaaggacttatataatatctagccttgacaatgaataaatttagagagtagtttgcctgtttgcctcatgttcataaatctattgacacatatgtgcatctgcacttcagcatggtagaagtccatattcctttgcttggaaaggcaggtgttcccattacgcctcagagaatagctgacgggaagaggctttctagatagttgtatgaaagatatacaaaatctcgcaggtatacacaggcatgatttgctggttgggagagccacttgcctcatactgaggtttttgtgtctgcttttcagagtcctgattgccttttcccagtatctccagaaatgctcatacgatgagcatgccaaattagtgcaggaagtaacagactttgcaaagacgtgtgttgccgatgagtctgccgccaactgtgacaaatcccttgtgagtaccttctgattttgtggatctactttcctgctttctggaactctgtttcaaagccaatcatgactccatcacttaaggccccgggaacactgtggcagagggcagcagagagattgataaagccagggtgatgggaattttctgtgggactccatttcatagtaattgcagaagctacaatacactcaaaaagtctcaccacatgactgcccaaatgggagcttgacagtgacagtgacagtagatatgccaaagtggatgagggaaagaccacaagagctaaaccctgtaaaaagaactgtaggcaactaaggaatgcagagagaagaagttgccttggaagagcataccaactgcctctccaataccaatggtcatccctaaaacatacgtatgaataacatgcagactaagcaggctacatttaggaatatacatgtatttacataaatgtatatgcatgtaacaacaatgaatgaaaactgaggtcatggatctgaaagagagcaagggggcttacatgagagggtttggagggaggggttggagggagggaggtattattctttagttttacagggaacgtagtaaaaacataggcttctcccaaaggagcagagcccatgaggagctgtgcaaggttccccagcttgattttacctgctcctcaaattcccttgatttgtttttattataatgactttactcctagcttttagtgtcagatagaaaacatggaagg

SEQ ID NO: 153 - DNA, 1350 bp, Homo sapiens
  source 1..1350: mol_type = genomic DNA
taggaggctgaggcaggaggatcgcttgagcccaggagttcgagaccagcctgggcaacatagtgtgatcttgtatctataaaaataaacaaaattagcttggtgtggtggcgcctgtagtccccagccacttggaggggtgaggtgagaggattgcttgagcccgggatggtccaggctgcagtgagccatgatcgtgccactgcactccagcctgggcgacagagtgagaccctgtctcacaacaacaacaacaacaacaaaaaggctgagctgcaccatgcttgacccagtttcttaaaattgttgtcaaagcttcattcactccatggtgctatagagcacaagattttatttggtgagatggtgctttcatgaattcccccaacagagccaagctctccatctagtggacagggaagctagcagcaaaccttcccttcactacaaaacttcattgcttggccaaaaagagagttaattcaatgtagacatctatgtaggcaattaaaaacctattgatgtataaaacagtttgcattcatggagggcaactaaatacattctaggactttataaaagatcactttttatttatgcacagggtggaacaagatggattatcaagtgtcaagtccaatctatgacatcaattattatacatcggagccctgccaaaaaatcaatgtgaagcaaatcgcagcccgcctcctgcctccgctctactcactggtgttcatctttggttttgtgggcaacatgctggtcatcctcatcctgataaactgcaaaaggctgaagagcatgactgacatctacctgctcaacctggccatctctgacctgtttttccttcttactgtccccttctgggctcactatgctgccgcccagtgggactttggaaatacaatgtgtcaactcttgacagggctctattttataggcttcttctctggaatcttcttcatcatcctcctgacaatcgataggtacctggctgtcgtccatgctgtgtttgctttaaaagccaggacggtcacctttggggtggtgacaagtgtgatcacttgggtggtggctgtgtttgcgtctctcccaggaatcatctttaccagatctcaaaaagaaggtcttcattacacctgcagctctcattttccatacagtcagtatcaattctggaagaatttccagacattaaagatagtcatcttggggctggtcctgccgctgcttgtcatggtcatctgctactcgggaatcctaaaaactctgcttcggtgtcgaaatgagaagaagaggcacagggctgtgaggcttatcttcaccatcatgattgtttatttt

SEQ ID NO: 154 - DNA, 1223 bp, Homo sapiens
  source 1..1223: mol_type = genomic DNA
tgacagagactcttgggatgacgcactgctgcatcaaccccatcatctatgcctttgtcggggagaagttcagaaactacctcttagtcttcttccaaaagcacattgccaaacgcttctgcaaatgctgttctattttccagcaagaggctcccgagcgagcaagctcagtttacacccgatccactggggagcaggaaatatctgtgggcttgtgacacggactcaagtgggctggtgacccagtcagagttgtgcacatggcttagttttcatacacagcctgggctgggggtggggtgggagaggtcttttttaaaaggaagttactgttatagagggtctaagattcatccatttatttggcatctgtttaaagtagattagatcttttaagcccatcaattatagaaagccaaatcaaaatatgttgatgaaaaatagcaacctttttatctccccttcacatgcatcaagttattgacaaactctcccttcactccgaaagttccttatgtatatttaaaagaaagcctcagagaattgctgattcttgagtttagtgatctgaacagaaataccaaaattatttcagaaatgtacaactttttacctagtacaaggcaacatataggttgtaaatgtgtttaaaacaggtctttgtcttgctatggggagaaaagacatgaatatgattagtaaagaaatgacacttttcatgtgtgatttcccctccaaggtatggttaataagtttcactgacttagaaccaggcgagagacttgtggcctgggagagctggggaagcttcttaaatgagaaggaatttgagttggatcatctattgctggcaaagacagaagcctcactgcaagcactgcatgggcaagcttggctgtagaaggagacagagctggttgggaagacatggggaggaaggacaaggctagatcatgaagaaccttgacggcattgctccgtctaagtcatgagctgagcagggagatcctggttggtgttgcagaaggtttactctgtggccaaaggagggtcaggaaggatgagcatttagggcaaggagaccaccaacagccctcaggtcagggtgaggatggcctctgctaagctcaaggcgtgaggatgggaaggagggaggtattcgtaaggatgggaaggagggaggtattcgtgcagcatatgaggatgcagagtcagcagaactg

SEQ ID NO: 155 - DNA, 215 bp, synthetic construct
  misc_feature 1..215: note = Description of Artificial Sequence: Synthetic polynucleotide
  source 1..215: mol_type = other DNA
gaacgctgacgtcatcaacccgctccaaggaatcgcgggcccagtgtcactaggcgggaacacccagcgcgcgtgcgccctggcaggaagatggctgtgagggacaggggagtggcgccctgcaatatttgcatgtcgctatgtgttctgggaaatcaccataaacgtgaaatgtctttggatttgggaatcttataagttctgtatgagaccac

SEQ ID NO: 156 - DNA, 141 bp, synthetic construct
  misc_feature 1..141: note = Description of Artificial Sequence: Synthetic polynucleotide
  source 1..141: mol_type = other DNA
cctgcaggcagctgcgcgctcgctcgctcacctaggccgcccgggcaaagcccgggcgtcgggcgacctttggtcgcccggcctaggtgagcgagcgagcgcgcagagagggagtggccaactccatcactaggggttcct

SEQ ID NO: 157 - DNA, 19 bp, synthetic construct
  misc_feature 1..19: note = Description of Artificial Sequence: Synthetic oligonucleotide
  source 1..19: mol_type = other DNA
gcgcgctcgctcgctcacc

SEQ ID NO: 158 - DNA, 22 bp, synthetic construct
  misc_feature 1..22: note = Description of Artificial Sequence: Synthetic oligonucleotide
  source 1..22: mol_type = other DNA
ctaggtgagcgagcgagcgcgc

SEQ ID NO: 159 - DNA, 75 bp, synthetic construct
  misc_feature 1..75: note = Description of Artificial Sequence: Synthetic oligonucleotide
  source 1..75: mol_type = other DNA
cctgcaggactgaggccgcccgggcaaagcccgggcgtcgggcgacctttggtcgcccggcctcagtcctgcagg

SEQ ID NO: 160 - DNA, 130 bp, synthetic construct
  misc_feature 1..130: note = Description of Artificial Sequence: Synthetic polynucleotide
  source 1..130: mol_type = other DNA
aggaacccctagtgatggagttggccactccctctctgcgcgctcgctcgctcactgagtgcgggcgaccaaaggtcgcccgacgcccgggcgcactcagtgagcgagcgagcgcgcagctgcctgcagg

SEQ ID NO: 161 - DNA, 142 bp, synthetic construct
  misc_feature 1..142: note = Description of Artificial Sequence: Synthetic polynucleotide
  source 1..142: mol_type = other DNA
cctgcaggcagctgcgcgctcgctcgctccctaggactgaggccgcccgggcgtcgggcgacctttggtcgcccggcctcagtcctagggagcgagcgagcgcgcagagagggagtggccaactccatcactaggggttcct

SEQ ID NO: 162 - DNA, 80 bp, synthetic construct
  misc_feature 1..80: note = Description of Artificial Sequence: Synthetic oligonucleotide
  source 1..80: mol_type = other DNA
gcgcgctcgctcgctcactgagtgcgggcgaccaaaggtcgcccgacgcccgggcgcactcagtgagcgagcgagcgcgc

SEQ ID NO: 163 - DNA, 21 bp, synthetic construct
  misc_feature 1..21: note = Description of Artificial Sequence: Synthetic oligonucleotide
  source 1..21: mol_type = other DNA
gcgcgctcgctcgctcactga

SEQ ID NO: 164 - DNA, 18 bp, synthetic construct
  misc_feature 1..18: note = Description of Artificial Sequence: Synthetic oligonucleotide
  source 1..18: mol_type = other DNA
gtgagcgagcgagcgcgc

SEQ ID NO: 165 - DNA, 89 bp, synthetic construct
  misc_feature 1..89: note = Description of Artificial Sequence: Synthetic oligonucleotide
  source 1..89: mol_type = other DNA
gcgcgctcgctcgctcactgaggccgcccgggcaaagcccgggcgtcgggcgactttgtcgcccggcctcagtgagcgagcgagcgcgc

SEQ ID NO: 166 - DNA, 89 bp, synthetic construct
  misc_feature 1..89: note = Description of Artificial Sequence: Synthetic oligonucleotide
  source 1..89: mol_type = other DNA
gcgcgctcgctcgctcactgaggccgggcgacaaagtcgcccgacgcccgggctttgcccgggcggcctcagtgagcgagcgagcgcgc

SEQ ID NO: 167 - DNA, 87 bp, synthetic construct
  misc_feature 1..87: note = Description of Artificial Sequence: Synthetic oligonucleotide
  source 1..87: mol_type = other DNA
gcgcgctcgctcgctcactgaggccgcccgggcaaagcccgggcgtcgggcgattttcgcccggcctcagtgagcgagcgagcgcgc

SEQ ID NO: 168 - DNA, 87 bp, synthetic construct
  misc_feature 1..87: note = Description of Artificial Sequence: Synthetic oligonucleotide
  source 1..87: mol_type = other DNA
gcgcgctcgctcgctcactgaggccgggcgaaaatcgcccgacgcccgggctttgcccgggcggcctcagtgagcgagcgagcgcgc

SEQ ID NO: 169 - DNA, 85 bp, synthetic construct
  misc_feature 1..85: note = Description of Artificial Sequence: Synthetic oligonucleotide
  source 1..85: mol_type = other DNA
gcgcgctcgctcgctcactgaggccgcccgggcaaagcccgggcgtcgggcgtttcgcccggcctcagtgagcgagcgagcgcgc

SEQ ID NO: 170 - DNA, 85 bp, synthetic construct
  misc_feature 1..85: note = Description of Artificial Sequence: Synthetic oligonucleotide
  source 1..85: mol_type = other DNA
gcgcgctcgctcgctcactgaggccgggcgaaacgcccgacgcccgggctttgcccgggcggcctcagtgagcgagcgagcgcgc

SEQ ID NO: 171 - DNA, 89 bp, synthetic construct
  misc_feature 1..89: note = Description of Artificial Sequence: Synthetic oligonucleotide
  source 1..89: mol_type = other DNA
gcgcgctcgctcgctcactgaggccgcccgggaaacccgggcgtcgggcgacctttggtcgcccggcctcagtgagcgagcgagcgcgc

SEQ ID NO: 172 - DNA, 89 bp, synthetic construct
  misc_feature 1..89: note = Description of Artificial Sequence: Synthetic oligonucleotide
  source 1..89: mol_type = other DNA
gcgcgctcgctcgctcactgaggccgggcgaccaaaggtcgcccgacgcccgggtttcccgggcggcctcagtgagcgagcgagcgcgc

SEQ ID NO: 173 - DNA, 87 bp, synthetic construct
  misc_feature 1..87: note = Description of Artificial Sequence: Synthetic oligonucleotide
  source 1..87: mol_type = other DNA
gcgcgctcgctcgctcactgaggccgcccggaaaccgggcgtcgggcgacctttggtcgcccggcctcagtgagcgagcgagcgcgc

SEQ ID NO: 174 - DNA, 87 bp, synthetic construct
  misc_feature 1..87: note = Description of Artificial Sequence: Synthetic oligonucleotide
  source 1..87: mol_type = other DNA
gcgcgctcgctcgctcactgaggccgggcgaccaaaggtcgcccgacgcccggtttccgggcggcctcagtgagcgagcgagcgcgc

SEQ ID NO: 175 - DNA, 85 bp, synthetic construct
  misc_feature 1..85: note = Description of Artificial Sequence: Synthetic oligonucleotide
  source 1..85: mol_type = other DNA
gcgcgctcgctcgctcactgaggccgcccgaaacgggcgtcgggcgacctttggtcgcccggcctcagtgagcgagcgagcgcgc

SEQ ID NO: 176 - DNA, 85 bp, synthetic construct
  misc_feature 1..85: note = Description of Artificial Sequence: Synthetic oligonucleotide
  source 1..85: mol_type = other DNA
gcgcgctcgctcgctcactgaggccgggcgaccaaaggtcgcccgacgcccgtttcgggcggcctcagtgagcgagcgagcgcgc

SEQ ID NO: 177 - DNA, 83 bp, synthetic construct
  misc_feature 1..83: note = Description of Artificial Sequence: Synthetic oligonucleotide
  source 1..83: mol_type = other DNA
gcgcgctcgctcgctcactgaggccgcccaaagggcgtcgggcgacctttggtcgcccggcctcagtgagcgagcgagcgcgc

SEQ ID NO: 178 - DNA, 83 bp, synthetic construct
  misc_feature 1..83: note = Description of Artificial Sequence: Synthetic oligonucleotide
  source 1..83: mol_type = other DNA
gcgcgctcgctcgctcactgaggccgggcgaccaaaggtcgcccgacgccctttgggcggcctcagtgagcgagcgagcgcgc

SEQ ID NO: 179 - DNA, 81 bp, synthetic construct
  misc_feature 1..81: note = Description of Artificial Sequence: Synthetic oligonucleotide
  source 1..81: mol_type = other DNA
gcgcgctcgctcgctcactgaggccgccaaaggcgtcgggcgacctttggtcgcccggcctcagtgagcgagcgagcgcgc

SEQ ID NO: 180 - DNA, 81 bp, synthetic construct
  misc_feature 1..81: note = Description of Artificial Sequence: Synthetic oligonucleotide
  source 1..81: mol_type = other DNA
gcgcgctcgctcgctcactgaggccgggcgaccaaaggtcgcccgacgcctttggcggcctcagtgagcgagcgagcgcgc

SEQ ID NO: 181 - DNA, 79 bp, synthetic construct
  misc_feature 1..79: note = Description of Artificial Sequence: Synthetic oligonucleotide
  source 1..79: mol_type = other DNA
gcgcgctcgctcgctcactgaggccgcaaagcgtcgggcgacctttggtcgcccggcctcagtgagcgagcgagcgcgc

SEQ ID NO: 182 - DNA, 79 bp, synthetic construct
  misc_feature 1..79: note = Description of Artificial Sequence: Synthetic oligonucleotide
  source 1..79: mol_type = other DNA
gcgcgctcgctcgctcactgaggccgggcgaccaaaggtcgcccgacgctttgcggcctcagtgagcgagcgagcgcgc

SEQ ID NO: 183 - DNA, 81 bp, synthetic construct
  misc_feature 1..81: note = Description of Artificial Sequence: Synthetic oligonucleotide
  source 1..81: mol_type = other DNA
ctgcgcgctcgctcgctcactgaggccgaaacgtcgggcgacctttggtcgcccggcctcagtgagcgagcgagcgcgcag

SEQ ID NO: 184 - DNA, 81 bp, synthetic construct
  misc_feature 1..81: note = Description of Artificial Sequence: Synthetic oligonucleotide
  source 1..81: mol_type = other DNA
ctgcgcgctcgctcgctcactgaggccgggcgaccaaaggtcgcccgacgtttcggcctcagtgagcgagcgagcgcgcag

SEQ ID NO: 185 - DNA, 72 bp, synthetic construct; identical to SEQ ID NO: 104
  misc_feature 1..72: note = Description of Artificial Sequence: Synthetic oligonucleotide
  source 1..72: mol_type = other DNA

SEQ ID NO: 186 - DNA, 80 bp, synthetic construct; identical to SEQ ID NO: 114
  misc_feature 1..80: note = Description of Artificial Sequence: Synthetic oligonucleotide
  source 1..80: mol_type = other DNA

SEQ ID NO: 187 - DNA, 79 bp, synthetic construct; identical to SEQ ID NO: 115
  misc_feature 1..79: note = Description of Artificial Sequence: Synthetic oligonucleotide
  source 1..79: mol_type = other DNA

SEQ ID NO: 188 - DNA, 48 bp, synthetic construct
  misc_feature 1..48: note = Description of Artificial Sequence: Synthetic oligonucleotide
  source 1..48: mol_type = other DNA
ggagtcaaagttctgtttgccctgatctgcatcgctgtggccgaggcc

SEQ ID NO: 189 - DNA, 99 bp, synthetic construct
  misc_feature 1..99: note = Description of Artificial Sequence: Synthetic oligonucleotide
  source 1..99: mol_type = other DNA
attcataccaacttgaagaaaaagttcagcctcttcatcctggtctttctcctgttcgcagtcatctgtgtttggaagaaagggagcgactatgaggcc

SEQ ID NO: 190 - DNA, 588 bp, synthetic construct
  misc_feature 1..588: note = Description of Artificial Sequence: Synthetic polynucleotide
  source 1..588: mol_type = other DNA
gcccctctccctcccccccccctaacgttactggccgaagccgcttggaataaggccggtgtgcgtttgtctatatgttattttccaccatattgccgtcttttggcaatgtgagggcccggaaacctggccctgtcttcttgacgagcattcctaggggtctttcccctctcgccaaaggaatgcaaggtctgttgaatgtcgtgaaggaagcagttcctctggaagcttcttgaagacaaacaacgtctgtagcgaccctttgcaggcagcggaaccccccacctggcgacaggtgcctctgcggccaaaagccacgtgtataagatacacctgcaaaggcggcacaaccccagtgccacgttgtgagttggatagttgtggaaagagtcaaatggctctcctcaagcgtattcaacaaggggctgaaggatgcccagaaggtaccccattgtatgggatctgatctggggcctcggtgcacatgctttacatgtgtttagtcgaggttaaaaaaacgtctaggccccccgaaccacggggacgtggttttcctttgaaaaacacgatgataatatggccacaacc

SEQ ID NO: 191 - DNA, 399 bp, synthetic construct
  misc_feature 1..399: note = Description of Artificial Sequence: Synthetic polynucleotide
  source 1..399: mol_type = other DNA
cgggggaggctgctggtgaatattaaccaaggtcaccccagttatcggaggagcaaacaggggctaagtccacacgcgtggtaccgtctgtctgcacatttcgtagagcgagtgttccgatactctaatctccctaggcaaggttcatatttgtgtaggttacttattctccttttgttgactaagtcaataatcagaatcagcaggtttggagtcagcttggcagggatcagcagcctgggttggaaggagggggtataaaagccccttcaccaggagaagccgtcacacagatccacaagctcctgaagaggtaagggtttaagggatggttggttggtggggtattaatgtttaattacctggagcacctgcctgaaatcactttttttcaggttg

SEQ ID NO: 192 - DNA, 14359 bp, synthetic construct
  misc_feature 1..14359: note = Description of Artificial Sequence: Synthetic polynucleotide
  source 1..14359: mol_type = other DNA
gacgcgccctgtagcggcgcattaagcgcggcgggtgtggtggttacgcgcagcgtgaccgctacacttgccagcgccctagcgcccgctcctttcgctttcttcccttcctttctcgccacgttcgccggctttccccgtcaagctctaaatcgggggctccctttagggttccgatttagtgctttacggcacctcgaccccaaaaaacttgattagggtgatggttcacgtagtgggccatcgccctgatagacggtttttcgccctttgacgttggagtccacgttctttaatagtggactcttgttccaaactggaacaacactcaaccctatctcggtctattcttttgatttataagggattttgccgatttcggcctattggttaaaaaatgagctgatttaacaaaaatttaacgcgaattttaacaaaatattaacgtttacaatttcaggtggcacttttcggggaaatgtgcgcggaacccctatttgtttatttttctaaatacattcaaatatgtatccgctcatgagacaataaccctgataaatgcttcaataatattgaaaaaggaagagtatgagtattcaacatttccgtgtcgcccttattcccttttttgcggcattttgccttcctgtttttgctcacccagaaacgctggtgaaagtaaaagatgctgaagatcagttgggtgcacgagtgggttacatcgaactggatctcaacagcggtaagatccttgagagttttcgccccgaagaacgttttccaatgatgagcacttttaaagttctgctatgtggcgcggtattatcccgtattgacgccgggcaagagcaactcggtcgccgcatacactattctcagaatgacttggttgagtactcaccagtcacagaaaagcatcttacggatggcatgacagtaagagaattatgcagtgctgccataaccatgagtgataacactgcggccaacttacttctgacaacgatcggaggaccgaaggagctaaccgcttttttgcacaacatgggggatcatgtaactcgccttgatcgttgggaaccggagctgaatgaagccataccaaacgacgagcgtgacaccacgatgcctgtagcaatggcaacaacgttgcgcaaactattaactggcgaactacttactctagcttcccggcaacaattaatagactggatggaggcggataaagttgcaggaccacttctgcgctcggcccttccggctggctggtttattgctgataaatctggagccggtgagcgtgggtctcgcggtatcattgcagcactggggccagatggtaagccctcccgtatcgtagttatctacacgacggggagtcaggcaactatggatgaacgaaatagacagatcgctgagataggtgcctcactgattaagcattggtaactgtcagaccaagtttactcatatatactttagattgatttaaaacttcatttttaatttaaaaggatctaggtgaagatcctttttgataatctcatgaccaaaatcccttaacgtgagttttcgttccactgagcgtcagaccccgtagaaaagatcaaaggatcttcttgagatcctttttttctgcgcgtaatctgctgcttgcaaacaaaaaaaccaccgctaccagcggtggtttgtttgccggatcaagagctaccaactctttttccgaaggtaactggcttcagcagagcgcagataccaaatactgtccttctagtgtagccgtagttaggccaccacttcaagaactctgtagcaccgcctacatacctcgctctgctaatcctgttaccagtggctgctgccagtggcgataagtcgtgtcttaccgggttggactcaagacgatagttaccggataaggcgcagcggtcgggctgaacggggggttcgtgcacacagcccagcttggagcgaacgacctacaccgaactgagatacctacagcgtgagcattgagaaagcgccacgcttcccgaagggagaaaggcggacaggtatccggtaagcggcagggtcggaacaggagagcgcacgagggagcttccagggggaaacgcctggtatctttatagtcctgtcgggtttcgccacctctgacttgagcgtcgatttttgtgatgctcgtcaggggggcggagcctatggaaaaacgccagcaacgcggcctttttacggttcctggccttttgctggccttttgctcacatgttctttcctgcgttatcccctgattctgtggataaccgtattaccgcctttgagtgagctgataccgctcgccgcagccgaacgaccgagcgcagcgagtcagtgagcgaggaagcggaagagcgcctgatgcggtattttctccttacgcatctgtgcggtatttcacaccgcagaccagccgcgtaacctggcaaaatcggttacggttgagtaataaatggatgccctgcgtaagcgggtgtgggcggacaataaagtcttaaactgaacaaaatagatctaaactatgacaataaagtcttaaactagacagaatagttgtaaactgaaatcagtccagttatgctgtgaaaaagcatactggacttttgttatggctaaagcaaactcttcattttctgaagtgcaaattgcccgtcgtattaaagaggggcgtggccaagggcatggtaaagactatattcgcggcgttgtgacaatttaccgaacaactccgcggccgggaagccgatctcggcttgaacgaattgttaggtggcggtacttgggtcgatatcaaagtgcatcacttcttcccgtatgcccaactttgtatagagagccactgcgggatcgtcaccgtaatctgcttgcacgtagatcacataagcaccaagcgcgttggcctcatgcttgaggagattgatgagcgcggtggcaatgccctgcctccggtgctcgccggagactgcgagatcatagatatagatctcactacgcggctgctcaaacctgggcagaacgtaagccgcgagagcgccaacaaccgcttcttggtcgaaggcagcaagcgcgatgaatgtcttactacggagcaagttcccgaggtaatcggagtccggctgatgttgggagtaggtggctacgtctccgaactcacgaccgaaaagatcaagagcagcccgcatggatttgacttggtcagggccgagcctacatgtgcgaatgatgcccatacttgagccacctaactttgttttagggcgactgccctgctgcgtaacatcgttgctgctgcgtaacatcgttgctgctccataacatcaaacatcgacccacggcgtaacgcgcttgctgcttggatgcccgaggcatagactgtacaaaaaaacagtcataacaagccatgaaaaccgccactgcgccgttaccaccgctgcgttcggtcaaggttctggaccagttgcgtgagcgcatacgctacttgcattacagtttacgaaccgaacaggcttatgtcaactgggttcgtgccttcatccgtttccacggtgtgcgtcacccggcaaccttgggcagcagcgaagtcgaggcatttctgtcctggctggcgaacgagcgcaaggtttcggtctccacgcatcgtcaggcattggcggccttgctgttcttctacggcaaggtgctgtgcacggatctgccctggcttcaggagatcggaagacctcggccgtcgcggcgcttgccggtggtgctgaccccggatgaagtggttcgcatcctcggttttctggaaggcgagcatcgtttgttcgcccaggactctagctatagttctagtggttggctacgtatactccggaatattaatagatcatggagataattaaaatgataaccatctcgcaaataaataagtattttactgttttcgtaacagttttgtaataaaaaaacctataaatattccggattattcataccgtcccaccatcgggcgcggatctcggtccgaaaccatgtcgtactaccatcaccatcaccatcacgattacgatatcccaacgaccgaaaacctgtattttcagggcgccatgggatccggccggcccctgcaggcagctgcgcgctcgctcgctcactgaggccgcccgggcaaagcccgggcgtcgggcgacctttggtcgcccggcctcagtgagcgagcgagcgcgcagagagggagtggccaactccatcactaggggttccttgtagttaatgattaacccgccatgctacttatctacgtagccatgctctagagcggccgcaggctcagaggcacacaggagtttctgggctcaccctgcccccttccaacccctcagttcccatcctccagcagctgtttgtgtgctgcctctgaagtccacactgaacaaacttcagcctactcatgtccctaaaatgggcaaacattgcaagcagcaaacagcaaacacacagccctccctgcctgctgaccttggagctggggcagaggtcagagacctctctgggcccatgccacctccaacatccactcgaccccttggaatttcggtggagaggagcagaggttgtcctggcgtggtttaggtagtgtgagagggtccgggttcaaaaccacttgctgggtggggagtcgtcagtaagtggctatgccccgaccccgaagcctgtttccccatctgtacaatggaaatgataaagacgcccatctgatagggtttttgtggcaaataaacatttggtttttttgttttgttttgttttgttttttgagatggaggtttgctctgtcgcccaggctggagtgcagtgacacaatctcatctcaccacaaccttcccctgcctcagcctcccaagtagctgggattacaagcatgtgccaccacacctggctaattttctatttttagtagagacgggtttctccatgttggtcagcctcagcctcccaagtaactgggattacaggcctgtgccaccacacccggctaattttttctatttttgacagggacggggtttcaccatgttggtcaggctggtctagaggtaccggatcttgctaccagtggaacagccactaaggattctgcagtgagagcagagggccagctaagtggtactctcccagagactgtctgactcacgccaccccctccaccttggacacaggacgctgtggtttctgagccaggtacaatgactcctttcggtaagtgcagtggaagctgtacactgcccaggcaaagcgtccgggcagcgtaggcgggcgactcagatcccagccagtggacttagcccctgtttgctcctccgataactggggtgaccttggttaatattcaccagcagcctcccccgttgcccctctggatccactgcttaaatacggacgaggacagggccctgtctcctcagcttcaggcaccaccactgacctgggacagtgaatccggactctaaggtaaatataaaatttttaagtgtataatgtgttaaactactgattctaattgtttctctcttttagattccaacctttggaactgagtttaaaccgcagccaccatgcagatcgagctgtctacctgcttcttcctgtgcctgctgcggttctgcttcagcgccaccagaagatattacctgggcgccgtggaactgagctgggactacatgcagtctgacctgggagagctgcccgtggacgctagatttcctccaagagtgcccaagagcttccccttcaacacctccgtggtgtacaagaaaaccctgttcgtggaattcaccgaccacctgttcaatatcgccaagcctcggcctccttggatgggactgctgggacctacaattcaggccgaggtgtacgacaccgtggtcatcaccctgaagaacatggccagccatcctgtgtctctgcacgccgtgggagtgtcttattggaaggcttctgagggcgccgagtacgacgatcagacaagccagagagagaaagaggacgacaaggttttccctggcggcagccacacctatgtctggcaggtcctgaaagaaaacggccctatggcctccgatcctctgtgcctgacatacagctacctgagccacgtggacctggtcaaggacctgaattctggcctgatcggagccctgctcgtgtgtagagaaggcagcctggccaaagagaaaacccagacactgcacaagttcatcctgctgttcgccgtgttcgacgagggcaagagctggcacagcgagacaaagaacagcctgatgcaggacagggatgccgcctctgctagagcttggcctaagatgcacaccgtgaacggctacgtgaacagaagcctgcctggactgatcggctgccacagaaagtccgtgtactggcacgtgatcggcatgggcacaacacctgaggtgcacagcatctttctggaaggccacaccttcctcgtgcggaaccacagacaggccagcctggaaatcagccctatcaccttcctgaccgctcagaccctgctgatggatctgggccagtttctgctgttctgccacatcagctcccaccagcacgatggcatggaagcctacgtgaaggtggacagctgccccgaagaaccccagctgcggatgaagaacaacgaggaagccgaggactacgacgacgacctgaccgactctgagatggacgtcgtcagattcgacgacgataacagccccagcttcatccagatcagaagcgtggccaagaagcaccccaagacctgggtgcactatatcgccgccgaggaagaggactgggattacgctcctctggtgctggcccctgacgacagaagctacaagagccagtacctgaacaacggccctcagcggatcggccggaagtataagaaagtgcggttcatggcctacaccgacgagacattcaagaccagagaggccatccagcacgagagcggaattctgggccctctgctgtatggcgaagtgggcgatacactgctgatcatcttcaagaaccaggccagcagaccctacaacatctaccctcacggcatcaccgatgtgcggcccctgtattctagaaggctgcccaagggcgtgaagcacctgaaggacttccctatcctgcctggcgagattttcaagtacaagtggaccgtgaccgtggaagatggccccaccaagagcgaccctagatgtctgacacggtactacagcagcttcgtgaacatggaacgcgacctggccagcggcctgattggacctctgctgatctgctacaaagaaagcgtggaccagcggggcaaccagatcatgagcgacaagcggaacgtgatcctgtttagcgtgttcgatgagaaccggtcctggtatctgaccgagaacatccagcggtttctgcccaatcctgccggggtgcaactggaagatcctgagttccaggcaagcaacatcatgcactccatcaatggctatgtgttcgacagcctgcagctgagcgtgtgcctgcacgaagtggcctactggtacatcctgagcattggcgcccagaccgacttcctgtccgtgttctttagcggctacaccttcaagcacaagatggtgtacgaggataccctgacactgttcccattcagcggcgagacagtgttcatgagcatggaaaaccccggcctgtggattctgggctgtcacaacagcgacttccggaacagaggcatgacagccctgctgaaggtgtccagctgcgacaagaacaccggcgactactacgaggacagctatgaggacatcagcgcctacctgctgagcaagaacaatgccatcgagcccagaagcttcagccagaatagcagacacccctccaccagacagaagcagttcaacgccacaacaatccccgagaacgacatcgagaaaaccgatccttggtttgcccacagaacccctatgcctaagatccagaacgtgtcctccagcgatctgctgatgctcctgagacagagccctacacctcacggactgagcctgtccgatctgcaagaggccaaatacgaaaccttcagcgacgacccttctcctggcgccatcgacagcaacaatagcctgagcgagatgacccacttcagaccacagctgcaccacagcggcgacatggtgtttacacctgagagcggcctccagctgagactgaatgagaagctgggaaccaccgccgccaccgagctgaagaaactggacttcaaggtgtcctctaccagcaacaacctgatcagcacaatcccctccgacaacctggctgccggcaccgacaacacatcttctctgggcccacctagcatgcccgtgcactacgatagccagctggataccacactgttcggcaagaagtctagccctctgacagagtctggcggccctctgtctctgagcgaggaaaacaacgacagcaagctgctggaatccggcctgatgaacagccaagagtcctcctggggcaagaatgtgtccagcaccgagtccggcagactgttcaagggaaagagagcccacggacctgctctgctgaccaaggataacgccctgttcaaagtgtccatcagcctgctcaagaccaacaagacctccaacaactccgccaccaacagaaagacccacatcgacggccctagcctgctgatcgagaatagccctagcgtctggcagaatatcctggaaagcgacaccgagttcaagaaagtgacccctctgatccacgaccggatgctcatggacaagaacgccaccgctctgcggctgaaccacatgagcaacaagacaaccagcagcaagaatatggaaatggtgcagcagaagaaagagggccccattcctccagacgctcagaaccccgatatgagcttcttcaagatgctctttctgcccgagagcgcccggtggattcagagaacacacggcaagaactccctgaactccggccagggaccttctccaaagcagctggtttccctgggacctgagaagtccgtggaaggacagaacttcctgagcgaaaagaacaaagtggtcgtcggcaagggcgagttcaccaaggatgtgggcctgaaagagatggtctttcccagcagccggaacctgttcctgaccaacctggacaacctgcacgagaacaacacccacaatcaagagaagaagatccaagaggaaatcgaaaagaaagagacactcatccaagagaacgtggtgctgcctcagatccacacagtgaccggcaccaagaactttatgaagaatctgttcctgctgagtacccggcagaacgtggaaggcagctacgatggcgcttatgcccctgtgctgcaggacttcagatccctgaacgactccaccaatcggacaaagaagcacacagcccacttctccaagaagggcgaagaagagaacctggaaggactgggcaatcagaccaagcagatcgtcgagaagtacgcctgcaccaccagaatcagccccaacacaagccagcagaacttcgtgacccagcggagcaaaagagccctgaagcagtttcggctgcccctggaagaaaccgagctggaaaagcggatcatcgtggacgacaccagcacacagtggtccaagaacatgaagcacttgacccctagcacactgacccagatcgactacaacgagaaagagaagggcgctatcacacagagcccactgagcgactgtctgaccagaagccacagcatccctcaggccaacagatcccctctgccaatcgccaaagtgtctagcttccccagcatcagacccatctacctgaccagagtgctgttccaggacaacagcagccatctgccagccgccagctaccggaagaaagattctggcgtgcaagagagcagccactttctgcagggcgctaagaagaacaatctgagcctggctattctgaccctggaaatgaccggcgatcagagagaagtcggctctctgggcaccagcgccacaaatagcgtgacctacaaaaaggtggaaaacaccgtgctgcctaagcctgacctgccaaagacaagcggcaaggtggaactgctgccaaaggtgcacatctaccagaaggacctgtttcctaccgagacaagcaacggctctcccggccatctggatctggtggaaggatctctgctgcagggaaccgagggcgccatcaagtggaacgaggccaatagacctggcaaggtgcccttcctgagagtggccacagagtccagcgccaagacaccctctaaactgctggaccctctggcctgggacaaccactatggcactcagatccccaaagaggaatggaagtcccaagagaagtcccctgaaaagaccgccttcaagaagaaggacaccattctgtccctgaatgcctgcgagagcaaccacgccattgccgccatcaatgagggccagaacaagcccgagatcgaagtgacctgggccaagcagggaagaaccgagagactgtgtagccagaatcctcctgtgctgaagcggcaccagagagaaatcacccggaccacactgcagagcgaccaagaagagatcgattacgacgataccatcagcgtcgagatgaagaaagaagatttcgacatctacgacgaggacgagaatcagagccctcggagcttccagaagaaaaccaggcactactttattgccgccgtcgagcggctgtgggactacggaatgtctagctctcctcacgtgctgcggaatagagcccagtctggtagcgtgccccagttcaaaaaggtcgtgttccaagagttcaccgacggcagcttcacccagccactgtatagaggcgagctgaacgagcatctgggcctgctgggcccttatatcagagccgaagtggaagataacatcatggtcaccttccggaatcaggctagccggccttacagcttctacagctccctgatctcctacgaagaggaccagagacagggcgcagagccccggaagaatttcgtgaagcccaacgagactaagacctacttttggaaggtgcagcaccatatggcccctacaaaggacgagttcgactgcaaagcctgggcctacttctccgatgtggacctcgaaaaggacgtgcacagcggactcatcggcccactgcttgtgtgccacaccaacacactgaaccccgctcacggcagacaagtgacagtgcaagagttcgccctgtttttcaccatcttcgacgaaacgaagtcctggtacttcaccgaaaacatggaaagaaactgcagggccccttgcaacattcagatggaagatcccaccttcaaagagaactaccggttccacgccatcaacggctacatcatggacacactgcccggcctggttatggcccaggatcagagaatccggtggtatctgctgtccatgggctccaacgagaatatccactccatccacttcagcggccacgtgttcaccgtgcggaaaaaagaagagtacaaaatggccctgtacaatctgtaccctggggtgttcgaaaccgttgagatgctgcctagcaaggccggaatttggagagtggaatgtctgattggagagcacctccacgccgggatgagcaccctgtttctggtgtactccaacaagtgtcagacccctctcggcatggcctctggccacattagagacttccagatcaccgccagcggacagtatggacagtgggcccctaaactggccagactgcactactccggcagcatcaatgcctggtccaccaaagagcctttcagctggatcaaagtggacctgctggctcccatgatcatccacggaatcaagacccagggcgccagacaaaagttcagcagcctgtacatcagccagttcatcatcatgtacagcctggacggaaagaagtggcagacctaccggggcaatagcaccggcacactgatggtgttcttcggcaacgtggactccagcggcattaagcacaacatcttcaaccctccaatcattgcccggtacatccggctgcaccccacacactacagcatcaggtctaccctgagaatggaactgatgggctgcgacctgaacagctgctctatgcccctcggaatggaaagcaaggccatcagcgacgcccagatcacagcctctagctacttcaccaacatgttcgccacttggagcccctctaaggcccggcttcatctgcaaggcagaagcaacgcttggaggccccaagtgaacaaccccaaagaatggctccaggtggactttcagaaaaccatgaaagtgacaggcgtgaccacacagggcgtcaagtccctgctgacctctatgtacgtgaaagagtttctgatcagctccagccaggacggccaccagtggaccctgttcttccagaacggcaaagtgaaagtgttccagggaaatcaggacagcttcacacccgtggtcaatagtctggacccaccactgctgacccgctacctgcgaattcaccctcagtcttgggtgcaccagattgccctgcggatggaagtgctgggctgtgaagctcaggacctctactagttaattaagagcatcttaccgccatttattcccatatttgttctgtttttcttgatttgggtatacatttaaatgttaataaaacaaaatggtggggcaatcatttacatttttagggatatgtaattactagttcaggtgtattgccacaagacaaacatgttaagaaactttcccgttatttacgctctgttcctgttaatcaacctctggattacaaaatttgtgaaagattgactgatattcttaactatgttgctccttttacgctgtgtggatatgctgctttatagcctctgtatctagctattgcttcccgtacggctttcgttttctcctccttgtataaatcctggttgctgtctcttttagaggagttgtggcccgttgtccgtcaacgtggcgtggtgtgctctgtgtttgctgacgcaacccccactggctggggcattgccaccacctgtcaactcctttctgggactttcgctttccccctcccgatcgccacggcagaactcatcgccgcctgccttgcccgctgctggacaggggctaggttgctgggcactgataattccgtggtgttgtctgtgccttctagttgccagccatctgttgtttgcccctcccccgtgccttccttgaccctggaaggtgccactcccactgtcctttcctaataaaatgaggaaattgcatcgcattgtctgagtaggtgtcattctattctggggggtggggtggggcaggacagcaagggggaggattgggaagacaatagcaggcatgctggggatgcggtgggctctatggctctagagcatggctacgtagataagtagcatggcgggttaatcattaactacacctgcaggaggaacccctagtgatggagttggccactccctctctgcgcgctcgctcgctcactgaggccgggcgaccaaaggtcgcccgacgcccgggcggcctcagtgagcgagcgagcgcgcagctgcctgcaggggcgcgcctcgaggcatgcggtaccaagcttgtcgagaagtactagaggatcataatcagccataccacatttgtagaggttttacttgctttaaaaaacctcccacacctccccctgaacctgaaacataaaatgaatgcaattgttgttgttaacttgtttattgcagcttataatggttacaaataaagcaatagcatcacaaatttcacaaataaagcatttttttcactgcattctagttgtggtttgtccaaactcatcaatgtatcttatcatgtctggatctgatcactgatatcgcctaggagatccgaaccagataagtgaaatctagttccaaactattttgtcatttttaattttcgtattagcttacgacgctacacccagttcccatctattttgtcactcttccctaaataatccttaaaaactccatttccacccctcccagttcccaactattttgtccgcccacagcggggcatttttcttcctgttatgtttttaatcaaacatcctgccaactccatgtgacaaaccgtcatcttcggctactttttctctgtcacagaatgaaaatttttctgtcatctcttcgttattaatgtttgtaattgactgaatatcaacgcttatttgcagcctgaatggcgaatgg

SEQ ID NO: 193 - DNA, 11677 bp, synthetic construct
  misc_feature 1..11677: note = Description of Artificial Sequence: Synthetic polynucleotide
  source 1..11677: mol_type = other DNA
gacgcgccctgtagcggcgcattaagcgcggcgggtgtggtggttacgcgcagcgtgaccgctacacttgccagcgccctagcgcccgctcctttcgctttcttcccttcctttctcgccacgttcgccggctttccccgtcaagctctaaatcgggggctccctttagggttccgatttagtgctttacggcacctcgaccccaaaaaacttgattagggtgatggttcacgtagtgggccatcgccctgatagacggtttttcgccctttgacgttggagtccacgttctttaatagtggactcttgttccaaactggaacaacactcaaccctatctcggtctattcttttgatttataagggattttgccgatttcggcctattggttaaaaaatgagctgatttaacaaaaatttaacgcgaattttaacaaaatattaacgtttacaatttcaggtggcacttttcggggaaatgtgcgcggaacccctatttgtttatttttctaaatacattcaaatatgtatccgctcatgagacaataaccctgataaatgcttcaataatattgaaaaaggaagagtatgagtattcaacatttccgtgtcgcccttattcccttttttgcggcattttgccttcctgtttttgctcacccagaaacgctggtgaaagtaaaagatgctgaagatcagttgggtgcacgagtgggttacatcgaactggatctcaacagcggtaagatccttgagagttttcgccccgaagaacgttttccaatgatgagcacttttaaagttctgctatgtggcgcggtattatcccgtattgacgccgggcaagagcaactcggtcgccgcatacactattctcagaatgacttggttgagtactcaccagtcacagaaaagcatcttacggatggcatgacagtaagagaattatgcagtgctgccataaccatgagtgataacactgcggccaacttacttctgacaacgatcggaggaccgaaggagctaaccgcttttttgcacaacatgggggatcatgtaactcgccttgatcgttgggaaccggagctgaatgaagccataccaaacgacgagcgtgacaccacgatgcctgtagcaatggcaacaacgttgcgcaaactattaactggcgaactacttactctagcttcccggcaacaattaatagactggatggaggcggataaagttgcaggaccacttctgcgctcggcccttccggctggctggtttattgctgataaatctggagccggtgagcgtgggtctcgcggtatcattgcagcactggggccagatggtaagccctcccgtatcgtagttatctacacgacggggagtcaggcaactatggatgaacgaaatagacagatcgctgagataggtgcctcactgattaagcattggtaactgtcagaccaagtttactcatatatactttagattgatttaaaacttcatttttaatttaaaaggatctaggtgaagatcctttttgataatctcatgaccaaaatcccttaacgtgagttttcgttccactgagcgtcagaccccgtagaaaagatcaaaggatcttcttgagatcctttttttctgcgcgtaatctgctgcttgcaaacaaaaaaaccaccgctaccagcggtggtttgtttgccggatcaagagctaccaactctttttccgaaggtaactggcttcagcagagcgcagataccaaatactgtccttctagtgtagccgtagttaggccaccacttcaagaactctgtagcaccgcctacatacctcgctctgctaatcctgttaccagtggctgctgccagtggcgataagtcgtgtcttaccgggttggactcaagacgatagttaccggataaggcgcagcggtcgggctgaacggggggttcgtgcacacagcccagcttggagcgaacgacctacaccgaactgagatacctacagcgtgagcattgagaaagcgccacgcttcccgaagggagaaaggcggacaggtatccggtaagcggcagggtcggaacaggagagcgcacgagggagcttccagggggaaacgcctggtatctttatagtcctgtcgggtttcgccacctctgacttgagcgtcgatttttgtgatgctcgtcaggggggcggagcctatggaaaaacgccagcaacgcggcctttttacggttcctggccttttgctggccttttgctcacatgttctttcctgcgttatcccctgattctgtggataaccgtattaccgcctttgagtgagctgataccgctcgccgcagccgaacgaccgagcgcagcgagtcagtgagcgaggaagcggaagagcgcctgatgcggtattttctccttacgcatctgtgcggtatttcacaccgcagaccagccgcgtaacctggcaaaatcggttacggttgagtaataaatggatgccctgcgtaagcgggtgtgggcggacaataaagtcttaaactgaacaaaatagatctaaactatgacaataaagtcttaaactagacagaatagttgtaaactgaaatcagtccagttatgctgtgaaaaagcatactggacttttgttatggctaaagcaaactcttcattttctgaagtgcaaattgcccgtcgtattaaagaggggcgtggccaagggcatggtaaagactatattcgcggcgttgtgacaatttaccgaacaactccgcggccgggaagccgatctcggcttgaacgaattgttaggtggcggtacttgggtcgatatcaaagtgcatcacttcttcccgtatgcccaactttgtatagagagccactgcgggatcgtcaccgtaatctgcttgcacgtagatcacataagcaccaagcgcgttggcctcatgcttgaggagattgatgagcgcggtggcaatgccctgcctccggtgctcgccggagactgcgagatcatagatatagatctcactacgcggctgctcaaacctgggcagaacgtaagccgcgagagcgccaacaaccgcttcttggtcgaaggcagcaagcgcgatgaatgtcttactacggagcaagttcccgaggtaatcggagtccggctgatgttgggagtaggtggctacgtctccgaactcacgaccgaaaagatcaagagcagcccgcatggatttgacttggtcagggccgagcctacatgtgcgaatgatgcccatacttgagccacctaactttgttttagggcgactgccctgctgcgtaacatcgttgctgctgcgtaacatcgttgctgctccataacatcaaacatcgacccacggcgtaacgcgcttgctgcttggatgcccgaggcatagactgtacaaaaaaacagtcataacaagccatgaaaaccgccactgcgccgttaccaccgctgcgttcggtcaaggttctggaccagttgcgtgagcgcatacgctacttgcattacagtttacgaaccgaacaggcttatgtcaactgggttcgtgccttcatccgtttccacggtgtgcgtcacccggcaaccttgggcagcagcgaagtcgaggcatttctgtcctggctggcgaacgagcgcaaggtttcggtctccacgcatcgtcaggcattggcggccttgctgttcttctacggcaaggtgctgtgcacggatctgccctggcttcaggagatcggaagacctcggccgtcgcggcgcttgccggtggtgctgaccccggatgaagtggttcgcatcctcggttttctggaaggcgagcatcgtttgttcgcccaggactctagctatagttctagtggttggctacgtatactccggaatattaatagatcatggagataattaaaatgataaccatctcgcaaataaataagtattttactgttttcgtaacagttttgtaataaaaaaacctataaatattccggattattcataccgtcccaccatcgggcgcggatctcggtccgaaaccatgtcgtactaccatcaccatcaccatcacgattacgatatcccaacgaccgaaaacctgtattttcagggcgccatgggatccggccggcccctgcaggcagctgcgcgctcgctcgctcactgaggccgcccgggcaaagcccgggcgtcgggcgacctttggtcgcccggcctcagtgagcgagcgagcgcgcagagagggagtggccaactccatcactaggggttccttgtagttaatgattaacccgccatgctacttatctacgtagccatgctctagagcggccgcaggctcagaggcacacaggagtttctgggctcaccctgcccccttccaacccctcagttcccatcctccagcagctgtttgtgtgctgcctctgaagtccacactgaacaaacttcagcctactcatgtccctaaaatgggcaaacattgcaagcagcaaacagcaaacacacagccctccctgcctgctgaccttggagctggggcagaggtcagagacctctctgggcccatgccacctccaacatccactcgaccccttggaatttcggtggagaggagcagaggttgtcctggcgtggtttaggtagtgtgagagggtccgggttcaaaaccacttgctgggtggggagtcgtcagtaagtggctatgccccgaccccgaagcctgtttccccatctgtacaatggaaatgataaagacgcccatctgatagggtttttgtggcaaataaacatttggtttttttgttttgttttgttttgttttttgagatggaggtttgctctgtcgcccaggctggagtgcagtgacacaatctcatctcaccacaaccttcccctgcctcagcctcccaagtagctgggattacaagcatgtgccaccacacctggctaattttctatttttagtagagacgggtttctccatgttggtcagcctcagcctcccaagtaactgggattacaggcctgtgccaccacacccggctaattttttctatttttgacagggacggggtttcaccatgttggtcaggctggtctagaggtaccggatcttgctaccagtggaacagccactaaggattctgcagtgagagcagagggccagctaagtggtactctcccagagactgtctgactcacgccaccccctccaccttggacacaggacgctgtggtttctgagccaggtacaatgactcctttcggtaagtgcagtggaagctgtacactgcccaggcaaagcgtccgggcagcgtaggcgggcgactcagatcccagccagtggacttagcccctgtttgctcctccgataactggggtgaccttggttaatattcaccagcagcctcccccgttgcccctctggatccactgcttaaatacggacgaggacagggccctgtctcctcagcttcaggcaccaccactgacctgggacagtgaatccggactctaaggtaaatataaaatttttaagtgtataatgtgttaaactactgattctaattgtttctctcttttagattccaacctttggaactgagtttaaaccgcagccaccatgcagatcgagctgtctacctgcttcttcctgtgcctgctgcggttctgcttcagcgccaccagaagatattacctgggcgccgtggaactgagctgggactacatgcagtctgacctgggagagctgcccgtggacgctagatttcctccaagagtgcccaagagcttccccttcaacacctccgtggtgtacaagaaaaccctgttcgtggaattcaccgaccacctgttcaatatcgccaagcctcggcctccttggatgggactgctgggacctacaattcaggccgaggtgtacgacaccgtggtcatcaccctgaagaacatggccagccatcctgtgtctctgcacgccgtgggagtgtcttattggaaggcttctgagggcgccgagtacgacgatcagacaagccagagagagaaagaggacgacaaggttttccctggcggcagccacacctatgtctggcaggtcctgaaagaaaacggccctatggcctccgatcctctgtgcctgacatacagctacctgagccacgtggacctggtcaaggacctgaattctggcctgatcggagccctgctcgtgtgtagagaaggcagcctggccaaagagaaaacccagacactgcacaagttcatcctgctgttcgccgtgttcgacgagggcaagagctggcacagcgagacaaagaacagcctgatgcaggacagggatgccgcctctgctagagcttggcctaagatgcacaccgtgaacggctacgtgaacagaagcctgcctggactgatcggctgccacagaaagtccgtgtactggcacgtgatcggcatgggcacaacacctgaggtgcacagcatctttctggaaggccacaccttcctcgtgcggaaccacagacaggccagcctggaaatcagccctatcaccttcctgaccgctcagaccctgctgatggatctgggccagtttctgctgttctgccacatcagctcccaccagcacgatggcatggaagcctacgtgaaggtggacagctgccccgaagaaccccagctgcggatgaagaacaacgaggaagccgaggactacgacgacgacctgaccgactctgagatggacgtcgtcagattcgacgacgataacagccccagcttcatccagatcagaagcgtggccaagaagcaccccaagacctgggtgcactatatcgccgccgaggaagaggactgggattacgctcctctggtgctggcccctgacgacagaagctacaagagccagtacctgaacaacggccctcagcggatcggccggaagtataagaaagtgcggttcatggcctacaccgacgagacattcaagaccagagaggccatccagcacgagagcggaattctgggccctctgctgtatggcgaagtgggcgatacactgctgatcatcttcaagaaccaggccagcagaccctacaacatctaccctcacggcatcaccgatgtgcggcccctgtattctagaaggctgcccaagggcgtgaagcacctgaaggacttccctatcctgcctggcgagattttcaagtacaagtggaccgtgaccgtggaagatggccccaccaagagcgaccctagatgtctgacacggtactacagcagcttcgtgaacatggaacgcgacctggccagcggcctgattggacctctgctgatctgctacaaagaaagcgtggaccagcggggcaaccagatcatgagcgacaagcggaacgtgatcctgtttagcgtgttcgatgagaaccggtcctggtatctgaccgagaacatccagcggtttctgcccaatcctgccggggtgcaactggaagatcctgagttccaggcaagcaacatcatgcactccatcaatggctatgtgttcgacagcctgcagctgagcgtgtgcctgcacgaagtggcctactggtacatcctgagcattggcgcccagaccgacttcctgtccgtgttctttagcggctacaccttcaagcacaagatggtgtacgaggataccctgacactgttcccattcagcggcgagacagtgttcatgagcatggaaaaccccggcctgtggattctgggctgtcacaacagcgacttccggaacagaggcatgacagccctgctgaaggtgtccagctgcgacaagaacaccggcgactactacgaggacagctatgaggacatcagcgcctacctgctgagcaagaacaatgccatcgagcctcggagcttcagccagaatcctcctgtgctgaagcggcaccagcgcgagatcaccagaacaaccctgcagagcgaccaagaggaaatcgattacgacgacaccatcagcgtcgagatgaagaaagaagatttcgacatctacgacgaggacgagaatcagagccccagaagctttcagaaaaagacccggcactacttcattgccgccgtcgagagactgtgggactacggcatgtctagcagccctcacgtgctgagaaatagagcccagagcggcagcgtgccccagttcaagaaagtggtgttccaagagttcaccgacggcagcttcacccagccactgtatagaggcgagctgaacgagcatctgggcctgctgggcccttatatcagagccgaagtggaagataacatcatggtcaccttccggaatcaggctagccggccttacagcttctacagctccctgatcagctacgaagaggaccagagacagggcgctgagcccagaaagaacttcgtgaagcccaacgagactaagacctacttttggaaggtgcagcaccacatggcccctacaaaggacgagttcgactgcaaagcctgggcctacttctccgatgtggatctggaaaaggacgtgcacagcgggctcatcggaccactgcttgtgtgccacaccaacacactgaaccccgctcacggcagacaagtgacagtgcaagagttcgccctgttcttcaccatcttcgacgaaacaaagagctggtacttcaccgagaatatggaacggaactgcagagccccttgcaacatccagatggaagatcccaccttcaaagagaactaccggttccacgccatcaacggctacatcatggacacactgcccggcctggttatggcccaggatcagagaatccggtggtatctgctgtccatgggctccaacgagaatatccacagcatccacttcagcggccacgtgttcaccgtgcggaaaaaagaagagtacaaaatggccctgtacaatctgtaccctggggtgttcgaaaccgtggaaatgctgccttccaaggccggcatttggagagtggaatgtctgattggagagcacctccacgccggaatgagcaccctgtttctggtgtacagcaacaagtgtcagacccctctcggcatggcctctggacacatcagagacttccagatcaccgcctctggccagtacggacagtgggctcctaaactggctcggctgcactacagcggcagcatcaatgcctggtccaccaaagagcccttcagctggatcaaggtggacctgctggctcccatgatcatccacggaatcaagacccagggcgccagacagaagttcagcagcctgtacatcagccagttcatcatcatgtacagcctggacggcaagaagtggcagacctacagaggcaacagcaccggcacactcatggtgttcttcggcaacgtggactccagcggcattaagcacaacatcttcaaccctccaatcattgcccggtacatccggctgcaccccacacactacagcatccggtctaccctgagaatggaactgatgggctgcgacctgaacagctgctctatgcccctcggaatggaaagcaaggccatcagcgacgcccagatcacagccagcagctacttcaccaacatgttcgccacttggagcccctccaaggctagactgcatctgcagggcagaagcaacgcttggaggccccaagtgaacaaccccaaagagtggctgcaggttgactttcaaaagaccatgaaagtgaccggcgtgaccacacagggcgtcaagtctctgctgacctctatgtacgtgaaagagttcctgatctccagcagccaggacggccatcagtggaccctgtttttccagaacggcaaagtgaaagtgttccagggcaatcaggacagcttcacacccgtggtcaattctctggaccctccactgctgaccagatacctgcggattcaccctcagtcttgggtgcaccagatcgctctgcggatggaagtgctgggctgtgaagctcaggacctctactagttaattaagagcatcttaccgccatttattcccatatttgttctgtttttcttgatttgggtatacatttaaatgttaataaaacaaaatggtggggcaatcatttacatttttagggatatgtaattactagttcaggtgtattgccacaagacaaacatgttaagaaactttcccgttatttacgctctgttcctgttaatcaacctctggattacaaaatttgtgaaagattgactgatattcttaactatgttgctccttttacgctgtgtggatatgctgctttatagcctctgtatctagctattgcttcccgtacggctttcgttttctcctccttgtataaatcctggttgctgtctcttttagaggagttgtggcccgttgtccgtcaacgtggcgtggtgtgctctgtgtttgctgacgcaacccccactggctggggcattgccaccacctgtcaactcctttctgggactttcgctttccccctcccgatcgccacggcagaactcatcgccgcctgccttgcccgctgctggacaggggctaggttgctgggcactgataattccgtggtgttgtctgtgccttctagttgccagccatctgttgtttgcccctcccccgtgccttccttgaccctggaaggtgccactcccactgtcctttcctaataaaatgaggaaattgcatcgcattgtctgagtaggtgtcattctattctggggggtggggtggggcaggacagcaagggggaggattgggaagacaatagcaggcatgctggggatgcggtgggctctatggctctagagcatggctacgtagataagtagcatggcgggttaatcattaactacacctgcaggaggaacccctagtgatggagttggccactccctctctgcgcgctcgctcgctcactgaggccgggcgaccaaaggtcgcccgacgcccgggcggcctcagtgagcgagcgagcgcgcagctgcctgcaggggcgcgcctcgaggcatgcggtaccaagcttgtcgagaagtactagaggatcataatcagccataccacatttgtagaggttttacttgctttaaaaaacctcccacacctccccctgaacctgaaacataaaatgaatgcaattgttgttgttaacttgtttattgcagcttataatggttacaaataaagcaatagcatcacaaatttcacaaataaagcatttttttcactgcattctagttgtggtttgtccaaactcatcaatgtatcttatcatgtctggatctgatcactgatatcgcctaggagatccgaaccagataagtgaaatctagttccaaactattttgtcatttttaattttcgtattagcttacgacgctacacccagttcccatctattttgtcactcttccctaaataatccttaaaaactccatttccacccctcccagttcccaactattttgtccgcccacagcggggcatttttcttcctgttatgtttttaatcaaacatcctgccaactccatgtgacaaaccgtcatcttcggctactttttctctgtcacagaatgaaaatttttctgtcatctcttcgttattaatgtttgtaattgactgaatatcaacgcttatttgcagcctgaatggcgaatgg

SEQ ID NO: 194 - DNA, 13634 bp, synthetic construct
  misc_feature 1..13634: note = Description of Artificial Sequence: Synthetic polynucleotide
  source 1..13634: mol_type = other DNA
gacgcgccctgtagcggcgcattaagcgcggcgggtgtggtggttacgcgcagcgtgaccgctacacttgccagcgccctagcgcccgctcctttcgctttcttcccttcctttctcgccacgttcgccggctttccccgtcaagctctaaatcgggggctccctttagggttccgatttagtgctttacggcacctcgaccccaaaaaacttgattagggtgatggttcacgtagtgggccatcgccctgatagacggtttttcgccctttgacgttggagtccacgttctttaatagtggactcttgttccaaactggaacaacactcaaccctatctcggtctattcttttgatttataagggattttgccgatttcggcctattggttaaaaaatgagctgatttaacaaaaatttaacgcgaattttaacaaaatattaacgtttacaatttcaggtggcacttttcggggaaatgtgcgcggaacccctatttgtttatttttctaaatacattcaaatatgtatccgctcatgagacaataaccctgataaatgcttcaataatattgaaaaaggaagagtatgagtattcaacatttccgtgtcgcccttattcccttttttgcggcattttgccttcctgtttttgctcacccagaaacgctggtgaaagtaaaagatgctgaagatcagttgggtgcacgagtgggttacatcgaactggatctcaacagcggtaagatccttgagagttttcgccccgaagaacgttttccaatgatgagcacttttaaagttctgctatgtggcgcggtattatcccgtattgacgccgggcaagagcaactcggtcgccgcatacactattctcagaatgacttggttgagtactcaccagtcacagaaaagcatcttacggatggcatgacagtaagagaattatgcagtgctgccataaccatgagtgataacactgcggccaacttacttctgacaacgatcggaggaccgaaggagctaaccgcttttttgcacaacatgggggatcatgtaactcgccttgatcgttgggaaccggagctgaatgaagccataccaaacgacgagcgtgacaccacgatgcctgtagcaatggcaacaacgttgcgcaaactattaactggcgaactacttactctagcttcccggcaacaattaatagactggatggaggcggataaagttgcaggaccacttctgcgctcggcccttccggctggctggtttattgctgataaatctggagccggtgagcgtgggtctcgcggtatcattgcagcactggggccagatggtaagccctcccgtatcgtagttatctacacgacggggagtcaggcaactatggatgaacgaaatagacagatcgctgagataggtgcctcactgattaagcattggtaactgtcagaccaagtttactcatatatactttagattgatttaaaacttcatttttaatttaaaaggatctaggtgaagatcctttttgataatctcatgaccaaaatcccttaacgtgagttttcgttccactgagcgtcagaccccgtagaaaagatcaaaggatcttcttgagatcctttttttctgcgcgtaatctgctgcttgcaaacaaaaaaaccaccgctaccagcggtggtttgtttgccggatcaagagctaccaactctttttccgaaggtaactggcttcagcagagcgcagataccaaatactgtccttctagtgtagccgtagttaggccaccacttcaagaactctgtagcaccgcctacatacctcgctctgctaatcctgttaccagtggctgctgccagtggcgataagtcgtgtcttaccgggttggactcaagacgatagttaccggataaggcgcagcggtcgggctgaacggggggttcgtgcacacagcccagcttggagcgaacgacctacaccgaactgagatacctacagcgtgagcattgagaaagcgccacgcttcccgaagggagaaaggcggacaggtatccggtaagcggcagggtcggaacaggagagcgcacgagggagcttccagggggaaacgcctggtatctttatagtcctgtcgggtttcgccacctctgacttgagcgtcgatttttgtgatgctcgtcaggggggcggagcctatggaaaaacgccagcaacgcggcctttttacggttcctggccttttgctggccttttgctcacatgttctttcctgcgttatcccctgattctgtggataaccgtattaccgcctttgagtgagctgataccgctcgccgcagccgaacgaccgagcgcagcgagtcagtgagcgaggaagcggaagagcgcctgatgcggtattttctccttacgcatctgtgcggtatttcacaccgcagaccagccgcgtaacctggcaaaatcggttacggttgagtaataaatggatgccctgcgtaagcgggtgtgggcggacaataaagtcttaaactgaacaaaatagatctaaactatgacaataaagtcttaaactagacagaatagttgtaaactgaaatcagtccagttatgctgtgaaaaagcatactggacttttgttatggctaaagcaaactcttcattttctgaagtgcaaattgcccgtcgtattaaagaggggcgtggccaagggcatggtaaagactatattcgcggcgttgtgacaatttaccgaacaactccgcggccgggaagccgatctcggcttgaacgaattgttaggtggcggtacttgggtcgatatcaaagtgcatcacttcttcccgtatgcccaactttgtatagagagccactgcgggatcgtcaccgtaatctgcttgcacgtagatcacataagcaccaagcgcgttggcctcatgcttgaggagattgatgagcgcggtggcaatgccctgcctccggtgctcgccggagactgcgagatcatagatatagatctcactacgcggctgctcaaacctgggcagaacgtaagccgcgagagcgccaacaaccgcttcttggtcgaaggcagcaagcgcgatgaatgtcttactacggagcaagttcccgaggtaatcggagtccggctgatgttgggagtaggtggctacgtctccgaactcacgaccgaaaagatcaagagcagcccgcatggatttgacttggtcagggccgagcctacatgtgcgaatgatgcccatacttgagccacctaactttgttttagggcgactgccctgctgcgtaacatcgttgctgctgcgtaacatcgttgctgctccataacatcaaacatcgacccacggcgtaacgcgcttgctgcttggatgcccgaggcatagactgtacaaaaaaacagtcataacaagccatgaaaaccgccactgcgccgttaccaccgctgcgttcggtcaaggttctggaccagttgcgtgagcgcatacgctacttgcattacagtttacgaaccgaacaggcttatgtcaactgggttcgtgccttcatccgtttccacggtgtgcgtcacccggcaaccttgggcagcagcgaagtcgaggcatttctgtcctggctggcgaacgagcgcaaggtttcggtctccacgcatcgtcaggcattggcggccttgctgttcttctacggcaaggtgctgtgcacggatctgccctggcttcaggagatcggaagacctcggccgtcgcggcgcttgccggtggtgctgaccccggatgaagtggttcgcatcctcggttttctggaaggcgagcatcgtttgttcgcccaggactctagctatagttctagtggttggctacgtatactccggaatattaatagatcatggagataattaaaatgataaccatctcgcaaataaataagtattttactgttttcgtaacagttttgtaataaaaaaacctataaatattccggattattcataccgtcccaccatcgggcgcggatctcggtccgaaaccatgtcgtactaccatcaccatcaccatcacgattacgatatcccaacgaccgaaaacctgtattttcagggcgccatgggatccggccggcccctgcaggcagctgcgcgctcgctcgctcactgaggccgcccgggcaaagcccgggcgtcgggcgacctttggtcgcccggcctcagtgagcgagcgagcgcgcagagagggagtggccaactccatcactaggggttccttgtagttaatgattaacccgccatgctacttatctacgtagccatgctctagagcggccgcccctaaaatgggcaaacattgcaagcagcaaacagcaaacacacagccctccctgcctgctgaccttggagctggggcagaggtcagagacctctctgggcccatgccacctccaacatccactcgaccccttggaatttttcggtggagaggagcagaggttgtcctggcgtggtttaggtagtgtgagaggggaatgactcctttcggtaagtgcagtggaagctgtacactgcccaggcaaagcgtccgggcagcgtaggcgggcgactcagatcccagccagtggacttagcccctgtttgctcctccgataactggggtgaccttggttaatattcaccagcagcctcccccgttgcccctctggatccactgcttaaatacggacgaggacagggccctgtctcctcagcttcaggcaccaccactgacctgggacagtgaatccggactctaaggtaaatataaaatttttaagtgtataatgtgttaaactactgattctaattgtttctctcttttagattccaacctttggaactgagtttaaaccgcagccaccatgcagatcgagctgtctacctgcttcttcctgtgcctgctgcggttctgcttcagcgccaccagaagatattacctgggcgccgtggaactgagctgggactacatgcagtctgacctgggagagctgcccgtggacgctagatttcctccaagagtgcccaagagcttccccttcaacacctccgtggtgtacaagaaaaccctgttcgtggaattcaccgaccacctgttcaatatcgccaagcctcggcctccttggatgggactgctgggacctacaattcaggccgaggtgtacgacaccgtggtcatcaccctgaagaacatggccagccatcctgtgtctctgcacgccgtgggagtgtcttattggaaggcttctgagggcgccgagtacgacgatcagacaagccagagagagaaagaggacgacaaggttttccctggcggcagccacacctatgtctggcaggtcctgaaagaaaacggccctatggcctccgatcctctgtgcctgacatacagctacctgagccacgtggacctggtcaaggacctgaattctggcctgatcggagccctgctcgtgtgtagagaaggcagcctggccaaagagaaaacccagacactgcacaagttcatcctgctgttcgccgtgttcgacgagggcaagagctggcacagcgagacaaagaacagcctgatgcaggacagggatgccgcctctgctagagcttggcctaagatgcacaccgtgaacggctacgtgaacagaagcctgcctggactgatcggctgccacagaaagtccgtgtactggcacgtgatcggcatgggcacaacacctgaggtgcacagcatctttctggaaggccacaccttcctcgtgcggaaccacagacaggccagcctggaaatcagccctatcaccttcctgaccgctcagaccctgctgatggatctgggccagtttctgctgttctgccacatcagctcccaccagcacgatggcatggaagcctacgtgaaggtggacagctgccccgaagaaccccagctgcggatgaagaacaacgaggaagccgaggactacgacgacgacctgaccgactctgagatggacgtcgtcagattcgacgacgataacagccccagcttcatccagatcagaagcgtggccaagaagcaccccaagacctgggtgcactatatcgccgccgaggaagaggactgggattacgctcctctggtgctggcccctgacgacagaagctacaagagccagtacctgaacaacggccctcagcggatcggccggaagtataagaaagtgcggttcatggcctacaccgacgagacattcaagaccagagaggccatccagcacgagagcggaattctgggccctctgctgtatggcgaagtgggcgatacactgctgatcatcttcaagaaccaggccagcagaccctacaacatctaccctcacggcatcaccgatgtgcggcccctgtattctagaaggctgcccaagggcgtgaagcacctgaaggacttccctatcctgcctggcgagattttcaagtacaagtggaccgtgaccgtggaagatggccccaccaagagcgaccctagatgtctgacacggtactacagcagcttcgtgaacatggaacgcgacctggccagcggcctgattggacctctgctgatctgctacaaagaaagcgtggaccagcggggcaaccagatcatgagcgacaagcggaacgtgatcctgtttagcgtgttcgatgagaaccggtcctggtatctgaccgagaacatccagcggtttctgcccaatcctgccggggtgcaactggaagatcctgagttccaggcaagcaacatcatgcactccatcaatggctatgtgttcgacagcctgcagctgagcgtgtgcctgcacgaagtggcctactggtacatcctgagcattggcgcccagaccgacttcctgtccgtgttctttagcggctacaccttcaagcacaagatggtgtacgaggataccctgacactgttcccattcagcggcgagacagtgttcatgagcatggaaaaccccggcctgtggattctgggctgtcacaacagcgacttccggaacagaggcatgacagccctgctgaaggtgtccagctgcgacaagaacaccggcgactactacgaggacagctatgaggacatcagcgcctacctgctgagcaagaacaatgccatcgagcccagaagcttcagccagaatagcagacacccctccaccagacagaagcagttcaacgccacaacaatccccgagaacgacatcgagaaaaccgatccttggtttgcccacagaacccctatgcctaagatccagaacgtgtcctccagcgatctgctgatgctcctgagacagagccctacacctcacggactgagcctgtccgatctgcaagaggccaaatacgaaaccttcagcgacgacccttctcctggcgccatcgacagcaacaatagcctgagcgagatgacccacttcagaccacagctgcaccacagcggcgacatggtgtttacacctgagagcggcctccagctgagactgaatgagaagctgggaaccaccgccgccaccgagctgaagaaactggacttcaaggtgtcctctaccagcaacaacctgatcagcacaatcccctccgacaacctggctgccggcaccgacaacacatcttctctgggcccacctagcatgcccgtgcactacgatagccagctggataccacactgttcggcaagaagtctagccctctgacagagtctggcggccctctgtctctgagcgaggaaaacaacgacagcaagctgctggaatccggcctgatgaacagccaagagtcctcctggggcaagaatgtgtccagcaccgagtccggcagactgttcaagggaaagagagcccacggacctgctctgctgaccaaggataacgccctgttcaaagtgtccatcagcctgctcaagaccaacaagacctccaacaactccgccaccaacagaaagacccacatcgacggccctagcctgctgatcgagaatagccctagcgtctggcagaatatcctggaaagcgacaccgagttcaagaaagtgacccctctgatccacgaccggatgctcatggacaagaacgccaccgctctgcggctgaaccacatgagcaacaagacaaccagcagcaagaatatggaaatggtgcagcagaagaaagagggccccattcctccagacgctcagaaccccgatatgagcttcttcaagatgctctttctgcccgagagcgcccggtggattcagagaacacacggcaagaactccctgaactccggccagggaccttctccaaagcagctggtttccctgggacctgagaagtccgtggaaggacagaacttcctgagcgaaaagaacaaagtggtcgtcggcaagggcgagttcaccaaggatgtgggcctgaaagagatggtctttcccagcagccggaacctgttcctgaccaacctggacaacctgcacgagaacaacacccacaatcaagagaagaagatccaagaggaaatcgaaaagaaagagacactcatccaagagaacgtggtgctgcctcagatccacacagtgaccggcaccaagaactttatgaagaatctgttcctgctgagtacccggcagaacgtggaaggcagctacgatggcgcttatgcccctgtgctgcaggacttcagatccctgaacgactccaccaatcggacaaagaagcacacagcccacttctccaagaagggcgaagaagagaacctggaaggactgggcaatcagaccaagcagatcgtcgagaagtacgcctgcaccaccagaatcagccccaacacaagccagcagaacttcgtgacccagcggagcaaaagagccctgaagcagtttcggctgcccctggaagaaaccgagctggaaaagcggatcatcgtggacgacaccagcacacagtggtccaagaacatgaagcacttgacccctagcacactgacccagatcgactacaacgagaaagagaagggcgctatcacacagagcccactgagcgactgtctgaccagaagccacagcatccctcaggccaacagatcccctctgccaatcgccaaagtgtctagcttccccagcatcagacccatctacctgaccagagtgctgttccaggacaacagcagccatctgccagccgccagctaccggaagaaagattctggcgtgcaagagagcagccactttctgcagggcgctaagaagaacaatctgagcctggctattctgaccctggaaatgaccggcgatcagagagaagtcggctctctgggcaccagcgccacaaatagcgtgacctacaaaaaggtggaaaacaccgtgctgcctaagcctgacctgccaaagacaagcggcaaggtggaactgctgccaaaggtgcacatctaccagaaggacctgtttcctaccgagacaagcaacggctctcccggccatctggatctggtggaaggatctctgctgcagggaaccgagggcgccatcaagtggaacgaggccaatagacctggcaaggtgcccttcctgagagtggccacagagtccagcgccaagacaccctctaaactgctggaccctctggcctgggacaaccactatggcactcagatccccaaagaggaatggaagtcccaagagaagtcccctgaaaagaccgccttcaagaagaaggacaccattctgtccctgaatgcctgcgagagcaaccacgccattgccgccatcaatgagggccagaacaagcccgagatcgaagtgacctgggccaagcagggaagaaccgagagactgtgtagccagaatcctcctgtgctgaagcggcaccagagagaaatcacccggaccacactgcagagcgaccaagaagagatcgattacgacgataccatcagcgtcgagatgaagaaagaagatttcgacatctacgacgaggacgagaatcagagccctcggagcttccagaagaaaaccaggcactactttattgccgccgtcgagcggctgtgggactacggaatgtctagctctcctcacgtgctgcggaatagagcccagtctggtagcgtgccccagttcaaaaaggtcgtgttccaagagttcaccgacggcagcttcacccagccactgtatagaggcgagctgaacgagcatctgggcctgctgggcccttatatcagagccgaagtggaagataacatcatggtcaccttccggaatcaggctagccggccttacagcttctacagctccctgatctcctacgaagaggaccagagacagggcgcagagccccggaagaatttcgtgaagcccaacgagactaagacctacttttggaaggtgcagcaccatatggcccctacaaaggacgagttcgactgcaaagcctgggcctacttctccgatgtggacctcgaaaaggacgtgcacagcggactcatcggcccactgcttgtgtgccacaccaacacactgaaccccgctcacggcagacaagtgacagtgcaagagttcgccctgtttttcaccatcttcgacgaaacgaagtcctggtacttcaccgaaaacatggaaagaaactgcagggccccttgcaacattcagatggaagatcccaccttcaaagagaactaccggttccacgccatcaacggctacatcatggacacactgcccggcctggttatggcccaggatcagagaatccggtggtatctgctgtccatgggctccaacgagaatatccactccatccacttcagcggccacgtgttcaccgtgcggaaaaaagaagagtacaaaatggccctgtacaatctgtaccctggggtgttcgaaaccgttgagatgctgcctagcaaggccggaatttggagagtggaatgtctgattggagagcacctccacgccgggatgagcaccctgtttctggtgtactccaacaagtgtcagacccctctcggcatggcctctggccacattagagacttccagatcaccgccagcggacagtatggacagtgggcccctaaactggccagactgcactactccggcagcatcaatgcctggtccaccaaagagcctttcagctggatcaaagtggacctgctggctcccatgatcatccacggaatcaagacccagggcgccagacaaaagttcagcagcctgtacatcagccagttcatcatcatgtacagcctggacggaaagaagtggcagacctaccggggcaatagcaccggcacactgatggtgttcttcggcaacgtggactccagcggcattaagcacaacatcttcaaccctccaatcattgcccggtacatccggctgcaccccacacactacagcatcaggtctaccctgagaatggaactgatgggctgcgacctgaacagctgctctatgcccctcggaatggaaagcaaggccatcagcgacgcccagatcacagcctctagctacttcaccaacatgttcgccacttggagcccctctaaggcccggcttcatctgcaaggcagaagcaacgcttggaggccccaagtgaacaaccccaaagaatggctccaggtggactttcagaaaaccatgaaagtgacaggcgtgaccacacagggcgtcaagtccctgctgacctctatgtacgtgaaagagtttctgatcagctccagccaggacggccaccagtggaccctgttcttccagaacggcaaagtgaaagtgttccagggaaatcaggacagcttcacacccgtggtcaatagtctggacccaccactgctgacccgctacctgcgaattcaccctcagtcttgggtgcaccagattgccctgcggatggaagtgctgggctgtgaagctcaggacctctactagttaattaagagcatcttaccgccatttattcccatatttgttctgtttttcttgatttgggtatacatttaaatgttaataaaacaaaatggtggggcaatcatttacatttttagggatatgtaattactagttcaggtgtattgccacaagacaaacatgttaagaaactttcccgttatttacgctctgttcctgttaatcaacctctggattacaaaatttgtgaaagattgactgatattcttaactatgttgctccttttacgctgtgtggatatgctgctttatagcctctgtatctagctattgcttcccgtacggctttcgttttctcctccttgtataaatcctggttgctgtctcttttagaggagttgtggcccgttgtccgtcaacgtggcgtggtgtgctctgtgtttgctgacgcaacccccactggctggggcattgccaccacctgtcaactcctttctgggactttcgctttccccctcccgatcgccacggcagaactcatcgccgcctgccttgcccgctgctggacaggggctaggttgctgggcactgataattccgtggtgttgtctgtgccttctagttgccagccatctgttgtttgcccctcccccgtgccttccttgaccctggaaggtgccactcccactgtcctttcctaataaaatgaggaaattgcatcgcattgtctgagtaggtgtcattctattctggggggtggggtggggcaggacagcaagggggaggattgggaagacaatagcaggcatgctggggatgcggtgggctctatggctctagagcatggctacgtagataagtagcatggcgggttaatcattaactacacctgcaggaggaacccctagtgatggagttggccactccctctctgcgcgctcgctcgctcactgaggccgggcgaccaaaggtcgcccgacgcccgggcggcctcagtgagcgagcgagcgcgcagctgcctgcaggggcgcgcctcgaggcatgcggtaccaagcttgtcgagaagtactagaggatcataatcagccataccacatttgtagaggttttacttgctttaaaaaacctcccacacctccccctgaacctgaaacataaaatgaatgcaattgttgttgttaacttgtttattgcagcttataatggttacaaataaagcaatagcatcacaaatttcacaaataaagcatttttttcactgcattctagttgtggtttgtccaaactcatcaatgtatcttatcatgtctggatctgatcactgatatcgcctaggagatccgaaccagataagtgaaatctagttccaaactattttgtcatttttaattttcgtattagcttacgacgctacacccagttcccatctattttgtcactcttccctaaataatccttaaaaactccatttccacccctcccagttcccaactattttgtccgcccacagcggggcatttttcttcctgttatgtttttaatcaaacatcctgccaactccatgtgacaaaccgtcatcttcggctactttttctctgtcacagaatgaaaatttttctgtcatctcttcgttattaatgtttgtaattgactgaatatcaacgcttatttgcagcctgaatggcgaatgg

SEQ ID NO: 195 - DNA, 10952 bp, synthetic construct
  misc_feature 1..10952: note = Description of Artificial Sequence: Synthetic polynucleotide
  source 1..10952: mol_type = other DNA
gacgcgccctgtagcggcgcattaagcgcggcgggtgtggtggttacgcgcagcgtgaccgctacacttgccagcgccctagcgcccgctcctttcgctttcttcccttcctttctcgccacgttcgccggctttccccgtcaagctctaaatcgggggctccctttagggttccgatttagtgctttacggcacctcgaccccaaaaaacttgattagggtgatggttcacgtagtgggccatcgccctgatagacggtttttcgccctttgacgttggagtccacgttctttaatagtggactcttgttccaaactggaacaacactcaaccctatctcggtctattcttttgatttataagggattttgccgatttcggcctattggttaaaaaatgagctgatttaacaaaaatttaacgcgaattttaacaaaatattaacgtttacaatttcaggtggcacttttcggggaaatgtgcgcggaacccctatttgtttatttttctaaatacattcaaatatgtatccgctcatgagacaataaccctgataaatgcttcaataatattgaaaaaggaagagtatgagtattcaacatttccgtgtcgcccttattcccttttttgcggcattttgccttcctgtttttgctcacccagaaacgctggtgaaagtaaaagatgctgaagatcagttgggtgcacgagtgggttacatcgaactggatctcaacagcggtaagatccttgagagttttcgccccgaagaacgttttccaatgatgagcacttttaaagttctgctatgtggcgcggtattatcccgtattgacgccgggcaagagcaactcggtcgccgcatacactattctcagaatgacttggttgagtactcaccagtcacagaaaagcatcttacggatggcatgacagtaagagaattatgcagtgctgccataaccatgagtgataacactgcggccaacttacttctgacaacgatcggaggaccgaaggagctaaccgcttttttgcacaacatgggggatcatgtaactcgccttgatcgttgggaaccggagctgaatgaagccataccaaacgacgagcgtgacaccacgatgcctgtagcaatggcaacaacgttgcgcaaactattaactggcgaactacttactctagcttcccggcaacaattaatagactggatggaggcggataaagttgcaggaccacttctgcgctcggcccttccggctggctggtttattgctgataaatctggagccggtgagcgtgggtctcgcggtatcattgcagcactggggccagatggtaagccctcccgtatcgtagttatctacacgacggggagtcaggcaactatggatgaacgaaatagacagatcgctgagataggtgcctcactgattaagcattggtaactgtcagaccaagtttactcatatatactttagattgatttaaaacttcatttttaatttaaaaggatctaggtgaagatcctttttgataatctcatgaccaaaatcccttaacgtgagttttcgttccactgagcgtcagaccccgtagaaaagatcaaaggatcttcttgagatcctttttttctgcgcgtaatctgctgcttgcaaacaaaaaaaccaccgctaccagcggtggtttgtttgccggatcaagagctaccaactctttttccgaaggtaactggcttcagcagagcgcagataccaaatactgtccttctagtgtagccgtagttaggccaccacttcaagaactctgtagcaccgcctacatacctcgctctgctaatcctgttaccagtggctgctgccagtggcgataagtcgtgtcttaccgggttggactcaagacgatagttaccggataaggcgcagcggtcgggctgaacggggggttcgtgcacacagcccagcttggagcgaacgacctacaccgaactgagatacctacagcgtgagcattgagaaagcgccacgcttcccgaagggagaaaggcggacaggtatccggtaagcggcagggtcggaacaggagagcgcacgagggagcttccagggggaaacgcctggtatctttatagtcctgtcgggtttcgccacctctgacttgagcgtcgatttttgtgatgctcgtcaggggggcggagcctatggaaaaacgccagcaacgcggcctttttacggttcctggccttttgctggccttttgctcacatgttctttcctgcgttatcccctgattctgtggataaccgtattaccgcctttgagtgagctgataccgctcgccgcagccgaacgaccgagcgcagcgagtcagtgagcgaggaagcggaagagcgcctgatgcggtattttctccttacgcatctgtgcggtatttcacaccgcagaccagccgcgtaacctggcaaaatcggttacggttgagtaataaatggatgccctgcgtaagcgggtgtgggcggacaataaagtcttaaactgaacaaaatagatctaaactatgacaataaagtcttaaactagacagaatagttgtaaactgaaatcagtccagttatgctgtgaaaaagcatactggacttttgttatggctaaagcaaactcttcattttctgaagtgcaaattgcccgtcgtattaaagaggggcgtggccaagggcatggtaaagactatattcgcggcgttgtgacaatttaccgaacaactccgcggccgggaagccgatctcggcttgaacgaattgttaggtggcggtacttgggtcgatatcaaagtgcatcacttcttcccgtatgcccaactttgtatagagagccactgcgggatcgtcaccgtaatctgcttgcacgtagatcacataagcaccaagcgcgttggcctcatgcttgaggagattgatgagcgcggtggcaatgccctgcctccggtgctcgccggagactgcgagatcatagatatagatctcactacgcggctgctcaaacctgggcagaacgtaagccgcgagagcgccaacaaccgcttcttggtcgaaggcagcaagcgcgatgaatgtcttactacggagcaagttcccgaggtaatcggagtccggctgatgttgggagtaggtggctacgtctccgaactcacgaccgaaaagatcaagagcagcccgcatggatttgacttggtcagggccgagcctacatgtgcgaatgatgcccatacttgagccacctaactttgttttagggcgactgccctgctgcgtaacatcgttgctgctgcgtaacatcgttgctgctccataacatcaaacatcgacccacggcgtaacgcgcttgctgcttggatgcccgaggcatagactgtacaaaaaaacagtcataacaagccatgaaaaccgccactgcgccgttaccaccgctgcgttcggtcaaggttctggaccagttgcgtgagcgcatacgctacttgcattacagtttacgaaccgaacaggcttatgtcaactgggttcgtgccttcatccgtttccacggtgtgcgtcacccggcaaccttgggcagcagcgaagtcgaggcatttctgtcctggctggcgaacgagcgcaaggtttcggtctccacgcatcgtcaggcattggcggccttgctgttcttctacggcaaggtgctgtgcacggatctgccctggcttcaggagatcggaagacctcggccgtcgcggcgcttgccggtggtgctgaccccggatgaagtggttcgcatcctcggttttctggaaggcgagcatcgtttgttcgcccaggactctagctatagttctagtggttggctacgtatactccggaatattaatagatcatggagataattaaaatgataaccatctcgcaaataaataagtattttactgttttcgtaacagttttgtaataaaaaaacctataaatattccggattattcataccgtcccaccatcgggcgcggatctcggtccgaaaccatgtcgtactaccatcaccatcaccatcacgattacgatatcccaacgaccgaaaacctgtattttcagggcgccatgggatccggccggcccctgcaggcagctgcgcgctcgctcgctcactgaggccgcccgggcaaagcccgggcgtcgggcgacctttggtcgcccggcctcagtgagcgagcgagcgcgcagagagggagtggccaactccatcactaggggttccttgtagttaatgattaacccgccatgctacttatctacgtagccatgctctagagcggccgcccctaaaatgggcaaacattgcaagcagcaaacagcaaacacacagccctccctgcctgctgaccttggagctggggcagaggtcagagacctctctgggcccatgccacctccaacatccactcgaccccttggaatttttcggtggagaggagcagaggttgtcctggcgtggtttaggtagtgtgagaggggaatgactcctttcggtaagtgcagtggaagctgtacactgcccaggcaaagcgtccgggcagcgtaggcgggcgactcagatcccagccagtggacttagcccctgtttgctcctccgataactggggtgaccttggttaatattcaccagcagcctcccccgttgcccctctggatccactgcttaaatacggacgaggacagggccctgtctcctcagcttcaggcaccaccactgacctgggacagtgaatccggactctaaggtaaatataaaatttttaagtgtataatgtgttaaactactgattctaattgtttctctcttttagattccaacctttggaactgagtttaaaccgcagccaccatgcagatcgagctgtctacctgcttcttcctgtgcctgctgcggttctgcttcagcgccaccagaagatattacctgggcgccgtggaactgagctgggactacatgcagtctgacctgggagagctgcccgtggacgctagatttcctccaagagtgcccaagagcttccccttcaacacctccgtggtgtacaagaaaaccctgttcgtggaattcaccgaccacctgttcaatatcgccaagcctcggcctccttggatgggactgctgggacctacaattcaggccgaggtgtacgacaccgtggtcatcaccctgaagaacatggccagccatcctgtgtctctgcacgccgtgggagtgtcttattggaaggcttctgagggcgccgagtacgacgatcagacaagccagagagagaaagaggacgacaaggttttccctggcggcagccacacctatgtctggcaggtcctgaaagaaaacggccctatggcctccgatcctctgtgcctgacatacagctacctgagccacgtggacctggtcaaggacctgaattctggcctgatcggagccctgctcgtgtgtagagaaggcagcctggccaaagagaaaacccagacactgcacaagttcatcctgctgttcgccgtgttcgacgagggcaagagctggcacagcgagacaaagaacagcctgatgcaggacagggatgccgcctctgctagagcttggcctaagatgcacaccgtgaacggctacgtgaacagaagcctgcctggactgatcggctgccacagaaagtccgtgtactggcacgtgatcggcatgggcacaacacctgaggtgcacagcatctttctggaaggccacaccttcctcgtgcggaaccacagacaggccagcctggaaatcagccctatcaccttcctgaccgctcagaccctgctgatggatctgggccagtttctgctgttctgccacatcagctcccaccagcacgatggcatggaagcctacgtgaaggtggacagctgccccgaagaaccccagctgcggatgaagaacaacgaggaagccgaggactacgacgacgacctgaccgactctgagatggacgtcgtcagattcgacgacgataacagccccagcttcatccagatcagaagcgtggccaagaagcaccccaagacctgggtgcactatatcgccgccgaggaagaggactgggattacgctcctctggtgctggcccctgacgacagaagctacaagagccagtacctgaacaacggccctcagcggatcggccggaagtataagaaagtgcggttcatggcctacaccgacgagacattcaagaccagagaggccatccagcacgagagcggaattctgggccctctgctgtatggcgaagtgggcgatacactgctgatcatcttcaagaaccaggccagcagaccctacaacatctaccctcacggcatcaccgatgtgcggcccctgtattctagaaggctgcccaagggcgtgaagcacctgaaggacttccctatcctgcctggcgagattttcaagtacaagtggaccgtgaccgtggaagatggccccaccaagagcgaccctagatgtctgacacggtactacagcagcttcgtgaacatggaacgcgacctggccagcggcctgattggacctctgctgatctgctacaaagaaagcgtggaccagcggggcaaccagatcatgagcgacaagcggaacgtgatcctgtttagcgtgttcgatgagaaccggtcctggtatctgaccgagaacatccagcggtttctgcccaatcctgccggggtgcaactggaagatcctgagttccaggcaagcaacatcatgcactccatcaatggctatgtgttcgacagcctgcagctgagcgtgtgcctgcacgaagtggcctactggtacatcctgagcattggcgcccagaccgacttcctgtccgtgttctttagcggctacaccttcaagcacaagatggtgtacgaggataccctgacactgttcccattcagcggcgagacagtgttcatgagcatggaaaaccccggcctgtggattctgggctgtcacaacagcgacttccggaacagaggcatgacagccctgctgaaggtgtccagctgcgacaagaacaccggcgactactacgaggacagctatgaggacatcagcgcctacctgctgagcaagaacaatgccatcgagcctcggagcttcagccagaatcctcctgtgctgaagcggcaccagcgcgagatcaccagaacaaccctgcagagcgaccaagaggaaatcgattacgacgacaccatcagcgtcgagatgaagaaagaagatttcgacatctacgacgaggacgagaatcagagccccagaagctttcagaaaaagacccggcactacttcattgccgccgtcgagagactgtgggactacggcatgtctagcagccctcacgtgctgagaaatagagcccagagcggcagcgtgccccagttcaagaaagtggtgttccaagagttcaccgacggcagcttcacccagccactgtatagaggcgagctgaacgagcatctgggcctgctgggcccttatatcagagccgaagtggaagataacatcatggtcaccttccggaatcaggctagccggccttacagcttctacagctccctgatcagctacgaagaggaccagagacagggcgctgagcccagaaagaacttcgtgaagcccaacgagactaagacctacttttggaaggtgcagcaccacatggcccctacaaaggacgagttcgactgcaaagcctgggcctacttctccgatgtggatctggaaaaggacgtgcacagcgggctcatcggaccactgcttgtgtgccacaccaacacactgaaccccgctcacggcagacaagtgacagtgcaagagttcgccctgttcttcaccatcttcgacgaaacaaagagctggtacttcaccgagaatatggaacggaactgcagagccccttgcaacatccagatggaagatcccaccttcaaagagaactaccggttccacgccatcaacggctacatcatggacacactgcccggcctggttatggcccaggatcagagaatccggtggtatctgctgtccatgggctccaacgagaatatccacagcatccacttcagcggccacgtgttcaccgtgcggaaaaaagaagagtacaaaatggccctgtacaatctgtaccctggggtgttcgaaaccgtggaaatgctgccttccaaggccggcatttggagagtggaatgtctgattggagagcacctccacgccggaatgagcaccctgtttctggtgtacagcaacaagtgtcagacccctctcggcatggcctctggacacatcagagacttccagatcaccgcctctggccagtacggacagtgggctcctaaactggctcggctgcactacagcggcagcatcaatgcctggtccaccaaagagcccttcagctggatcaaggtggacctgctggctcccatgatcatccacggaatcaagacccagggcgccagacagaagttcagcagcctgtacatcagccagttcatcatcatgtacagcctggacggcaagaagtggcagacctacagaggcaacagcaccggcacactcatggtgttcttcggcaacgtggactccagcggcattaagcacaacatcttcaaccctccaatcattgcccggtacatccggctgcaccccacacactacagcatccggtctaccctgagaatggaactgatgggctgcgacctgaacagctgctctatgcccctcggaatggaaagcaaggccatcagcgacgcccagatcacagccagcagctacttcaccaacatgttcgccacttggagcccctccaaggctagactgcatctgcagggcagaagcaacgcttggaggccccaagtgaacaaccccaaagagtggctgcaggttgactttcaaaagaccatgaaagtgaccggcgtgaccacacagggcgtcaagtctctgctgacctctatgtacgtgaaagagttcctgatctccagcagccaggacggccatcagtggaccctgtttttccagaacggcaaagtgaaagtgttccagggcaatcaggacagcttcacacccgtggtcaattctctggaccctccactgctgaccagatacctgcggattcaccctcagtcttgggtgcaccagatcgctctgcggatggaagtgctgggctgtgaagctcaggacctctactagttaattaagagcatcttaccgccatttattcccatatttgttctgtttttcttgatttgggtatacatttaaatgttaataaaacaaaatggtggggcaatcatttacatttttagggatatgtaattactagttcaggtgtattgccacaagacaaacatgttaagaaactttcccgttatttacgctctgttcctgttaatcaacctctggattacaaaatttgtgaaagattgactgatattcttaactatgttgctccttttacgctgtgtggatatgctgctttatagcctctgtatctagctattgcttcccgtacggctttcgttttctcctccttgtataaatcctggttgctgtctcttttagaggagttgtggcccgttgtccgtcaacgtggcgtggtgtgctctgtgtttgctgacgcaacccccactggctggggcattgccaccacctgtcaactcctttctgggactttcgctttccccctcccgatcgccacggcagaactcatcgccgcctgccttgcccgctgctggacaggggctaggttgctgggcactgataattccgtggtgttgtctgtgccttctagttgccagccatctgttgtttgcccctcccccgtgccttccttgaccctggaaggtgccactcccactgtcctttcctaataaaatgaggaaattgcatcgcattgtctgagtaggtgtcattctattctggggggtggggtggggcaggacagcaagggggaggattgggaagacaatagcaggcatgctggggatgcggtgggctctatggctctagagcatggctacgtagataagtagcatggcgggttaatcattaactacacctgcaggaggaacccctagtgatggagttggccactccctctctgcgcgctcgctcgctcactgaggccgggcgaccaaaggtcgcccgacgcccgggcggcctcagtgagcgagcgagcgcgcagctgcctgcaggggcgcgcctcgaggcatgcggtaccaagcttgtcgagaagtactagaggatcataatcagccataccacatttgtagaggttttacttgctttaaaaaacctcccacacctccccctgaacctgaaacataaaatgaatgcaattgttgttgttaacttgtttattgcagcttataatggttacaaataaagcaatagcatcacaaatttcacaaataaagcatttttttcactgcattctagttgtggtttgtccaaactcatcaatgtatcttatcatgtctggatctgatcactgatatcgcctaggagatccgaaccagataagtgaaatctagttccaaactattttgtcatttttaattttcgtattagcttacgacgctacacccagttcccatctattttgtcactcttccctaaataatccttaaaaactccatttccacccctcccagttcccaactattttgtccgcccacagcggggcatttttcttcctgttatgtttttaatcaaacatcctgccaactccatgtgacaaaccgtcatcttcggctactttttctctgtcacagaatgaaaatttttctgtcatctcttcgttattaatgtttgtaattgactgaatatcaacgcttatttgcagcctgaatggcgaatgg

SEQ ID NO: 196 - DNA, 14266 bp, synthetic construct
  misc_feature 1..14266: note = Description of Artificial Sequence: Synthetic polynucleotide
  source 1..14266: mol_type = other DNA
gacgcgccctgtagcggcgcattaagcgcggcgggtgtggtggttacgcgcagcgtgaccgctacacttgccagcgccctagcgcccgctcctttcgctttcttcccttcctttctcgccacgttcgccggctttccccgtcaagctctaaatcgggggctccctttagggttccgatttagtgctttacggcacctcgaccccaaaaaacttgattagggtgatggttcacgtagtgggccatcgccctgatagacggtttttcgccctttgacgttggagtccacgttctttaatagtggactcttgttccaaactggaacaacactcaaccctatctcggtctattcttttgatttataagggattttgccgatttcggcctattggttaaaaaatgagctgatttaacaaaaatttaacgcgaattttaacaaaatattaacgtttacaatttcaggtggcacttttcggggaaatgtgcgcggaacccctatttgtttatttttctaaatacattcaaatatgtatccgctcatgagacaataaccctgataaatgcttcaataatattgaaaaaggaagagtatgagtattcaacatttccgtgtcgcccttattcccttttttgcggcattttgccttcctgtttttgctcacccagaaacgctggtgaaagtaaaagatgctgaagatcagttgggtgcacgagtgggttacatcgaactggatctcaacagcggtaagatccttgagagttttcgccccgaagaacgttttccaatgatgagcacttttaaagttctgctatgtggcgcggtattatcccgtattgacgccgggcaagagcaactcggtcgccgcatacactattctcagaatgacttggttgagtactcaccagtcacagaaaagcatcttacggatggcatgacagtaagagaattatgcagtgctgccataaccatgagtgataacactgcggccaacttacttctgacaacgatcggaggaccgaaggagctaaccgcttttttgcacaacatgggggatcatgtaactcgccttgatcgttgggaaccggagctgaatgaagccataccaaacgacgagcgtgacaccacgatgcctgtagcaatggcaacaacgttgcgcaaactattaactggcgaactacttactctagcttcccggcaacaattaatagactggatggaggcggataaagttgcaggaccacttctgcgctcggcccttccggctggctggtttattgctgataaatctggagccggtgagcgtgggtctcgcggtatcattgcagcactggggccagatggtaagccctcccgtatcgtagttatctacacgacggggagtcaggcaactatggatgaacgaaatagacagatcgctgagataggtgcctcactgattaagcattggtaactgtcagaccaagtttactcatatatactttagattgatttaaaacttcatttttaatttaaaaggatctaggtgaagatcctttttgataatctcatgaccaaaatcccttaacgtgagttttcgttccactgagcgtcagaccccgtagaaaagatcaaaggatcttcttgagatcctttttttctgcgcgtaatctgctgcttgcaaacaaaaaaaccaccgctaccagcggtggtttgtttgccggatcaagagctaccaactctttttccgaaggtaactggcttcagcagagcgcagataccaaatactgtccttctagtgtagccgtagttaggccaccacttcaagaactctgtagcaccgcctacatacctcgctctgctaatcctgttaccagtggctgctgccagtggcgataagtcgtgtcttaccgggttggactcaagacgatagttaccggataaggcgcagcggtcgggctgaacggggggttcgtgcacacagcccagcttggagcgaacgacctacaccgaactgagatacctacagcgtgagcattgagaaagcgccacgcttcccgaagggagaaaggcggacaggtatccggtaagcggcagggtcggaacaggagagcgcacgagggagcttccagggggaaacgcctggtatctttatagtcctgtcgggtttcgccacctctgacttgagcgtcgatttttgtgatgctcgtcaggggggcggagcctatggaaaaacgccagcaacgcggcctttttacggttcctggccttttgctggccttttgctcacatgttctttcctgcgttatcccctgattctgtggataaccgtattaccgcctttgagtgagctgataccgctcgccgcagccgaacgaccgagcgcagcgagtcagtgagcgaggaagcggaagagcgcctgatgcggtattttctccttacgcatctgtgcggtatttcacaccgcagaccagccgcgtaacctggcaaaatcggttacggttgagtaataaatggatgccctgcgtaagcgggtgtgggcggacaataaagtcttaaactgaacaaaatagatctaaactatgacaataaagtcttaaactagacagaatagttgtaaactgaaatcagtccagttatgctgtgaaaaagcatactggacttttgttatggctaaagcaaactcttcattttctgaagtgcaaattgcccgtcgtattaaagaggggcgtggccaagggcatggtaaagactatattcgcggcgttgtgacaatttaccgaacaactccgcggccgggaagccgatctcggcttgaacgaattgttaggtggcggtacttgggtcgatatcaaagtgcatcacttcttcccgtatgcccaactttgtatagagagccactgcgggatcgtcaccgtaatctgcttgcacgtagatcacataagcaccaagcgcgttggcctcatgcttgaggagattgatgagcgcggtggcaatgccctgcctccggtgctcgccggagactgcgagatcatagatatagatctcactacgcggctgctcaaacctgggcagaacgtaagccgcgagagcgccaacaaccgcttcttggtcgaaggcagcaagcgcgatgaatgtcttactacggagcaagttcccgaggtaatcggagtccggctgatgttgggagtaggtggctacgtctccgaactcacgaccgaaaagatcaagagcagcccgcatggatttgacttggtcagggccgagcctacatgtgcgaatgatgcccatacttgagccacctaactttgttttagggcgactgccctgctgcgtaacatcgttgctgctgcgtaacatcgttgctgctccataacatcaaacatcgacccacggcgtaacgcgcttgctgcttggatgcccgaggcatagactgtacaaaaaaacagtcataacaagccatgaaaaccgccactgcgccgttaccaccgctgcgttcggtcaaggttctggaccagttgcgtgagcgcatacgctacttgcattacagtttacgaaccgaacaggcttatgtcaactgggttcgtgccttcatccgtttccacggtgtgcgtcacccggcaaccttgggcagcagcgaagtcgaggcatttctgtcctggctggcgaacgagcgcaaggtttcggtctccacgcatcgtcaggcattggcggccttgctgttcttctacggcaaggtgctgtgcacggatctgccctggcttcaggagatcggaagacctcggccgtcgcggcgcttgccggtggtgctgaccccggatgaagtggttcgcatcctcggttttctggaaggcgagcatcgtttgttcgcccaggactctagctatagttctagtggttggctacgtatactccggaatattaatagatcatggagataattaaaatgataaccatctcgcaaataaataagtattttactgttttcgtaacagttttgtaataaaaaaacctataaatattccggattattcataccgtcccaccatcgggcgcggatctcggtccgaaaccatgtcgtactaccatcaccatcaccatcacgattacgatatcccaacgaccgaaaacctgtattttcagggcgccatgggatccggccggcccctgcaggcagctgcgcgctcgctcgctcactgaggccgcccgggcaaagcccgggcgtcgggcgacctttggtcgcccggcctcagtgagcgagcgagcgcgcagagagggagtggccaactccatcactaggggttccttgtagttaatgattaacccgccatgctacttatctacgtagccatgctctagagcggccgcggctccggtgcccgtcagtgggcagagcgcacatcgcccacagtccccgagaagttggggggaggggtcggcaattgaaccggtgcctagagaaggtggcgcggggtaaactgggaaagtgatgtcgtgtactggctccgcctttttcccgagggtgggggagaaccgtatataagtgcagtagtcgccgtgaacgttctttttcgcaacgggtttgccgccagaacacaggtaagtgccgtgtgtggttcccgcgggcctggcctctttacgggttatggcccttgcgtgccttgaattacttccacctggctgcagtacgtgattcttgatcccgagcttcgggttggaagtgggtgggagagttcgaggccttgcgcttaaggagccccttcgcctcgtgcttgagttgaggcctggcctgggcgctggggccgccgcgtgcgaatctggtggcaccttcgcgcctgtctcgctgctttcgataagtctctagccatttaaaatttttgatgacctgctgcgacgctttttttctggcaagatagtcttgtaaatgcgggccaagatctgcacactggtatttcggtttttggggccgcgggcggcgacggggcccgtgcgtcccagcgcacatgttcggcgaggcggggcctgcgagcgcggccaccgagaatcggacgggggtagtctcaagctggccggcctgctctggtgcctggtctcgcgccgccgtgtatcgccccgccctgggcggcaaggctggcccggtcggcaccagttgcgtgagcggaaagatggccgcttcccggccctgctgcagggagctcaaaatggaggacgcggcgctcgggagagcgggcgggtgagtcacccacacaaaggaaaagggcctttccgtcctcagccgtcgcttcatgtgactccacggagtaccgggcgccgtccaggcacctcgattagttctcgagcttttggagtacgtcgtctttaggttggggggaggggttttatgcgatggagtttccccacactgagtgggtggagactgaagttaggccagcttggcacttgatgtaattctccttggaatttgccctttttgagtttggatcttggttcattctcaagcctcagacagtggttcaaagtttttttcttccatttcaggtgtcgtgagtttaaaccgcagccaccatgcagatcgagctgtctacctgcttcttcctgtgcctgctgcggttctgcttcagcgccaccagaagatattacctgggcgccgtggaactgagctgggactacatgcagtctgacctgggagagctgcccgtggacgctagatttcctccaagagtgcccaagagcttccccttcaacacctccgtggtgtacaagaaaaccctgttcgtggaattcaccgaccacctgttcaatatcgccaagcctcggcctccttggatgggactgctgggacctacaattcaggccgaggtgtacgacaccgtggtcatcaccctgaagaacatggccagccatcctgtgtctctgcacgccgtgggagtgtcttattggaaggcttctgagggcgccgagtacgacgatcagacaagccagagagagaaagaggacgacaaggttttccctggcggcagccacacctatgtctggcaggtcctgaaagaaaacggccctatggcctccgatcctctgtgcctgacatacagctacctgagccacgtggacctggtcaaggacctgaattctggcctgatcggagccctgctcgtgtgtagagaaggcagcctggccaaagagaaaacccagacactgcacaagttcatcctgctgttcgccgtgttcgacgagggcaagagctggcacagcgagacaaagaacagcctgatgcaggacagggatgccgcctctgctagagcttggcctaagatgcacaccgtgaacggctacgtgaacagaagcctgcctggactgatcggctgccacagaaagtccgtgtactggcacgtgatcggcatgggcacaacacctgaggtgcacagcatctttctggaaggccacaccttcctcgtgcggaaccacagacaggccagcctggaaatcagccctatcaccttcctgaccgctcagaccctgctgatggatctgggccagtttctgctgttctgccacatcagctcccaccagcacgatggcatggaagcctacgtgaaggtggacagctgccccgaagaaccccagctgcggatgaagaacaacgaggaagccgaggactacgacgacgacctgaccgactctgagatggacgtcgtcagattcgacgacgataacagccccagcttcatccagatcagaagcgtggccaagaagcaccccaagacctgggtgcactatatcgccgccgaggaagaggactgggattacgctcctctggtgctggcccctgacgacagaagctacaagagccagtacctgaacaacggccctcagcggatcggccggaagtataagaaagtgcggttcatggcctacaccgacgagacattcaagaccagagaggccatccagcacgagagcggaattctgggccctctgctgtatggcgaagtgggcgatacactgctgatcatcttcaagaaccaggccagcagaccctacaacatctaccctcacggcatcaccgatgtgcggcccctgtattctagaaggctgcccaagggcgtgaagcacctgaaggacttccctatcctgcctggcgagattttcaagtacaagtggaccgtgaccgtggaagatggccccaccaagagcgaccctagatgtctgacacggtactacagcagcttcgtgaacatggaacgcgacctggccagcggcctgattggacctctgctgatctgctacaaagaaagcgtggaccagcggggcaaccagatcatgagcgacaagcggaacgtgatcctgtttagcgtgttcgatgagaaccggtcctggtatctgaccgagaacatccagcggtttctgcccaatcctgccggggtgcaactggaagatcctgagttccaggcaagcaacatcatgcactccatcaatggctatgtgttcgacagcctgcagctgagcgtgtgcctgcacgaagtggcctactggtacatcctgagcattggcgcccagaccgacttcctgtccgtgttctttagcggctacaccttcaagcacaagatggtgtacgaggataccctgacactgttcccattcagcggcgagacagtgttcatgagcatggaaaaccccggcctgtggattctgggctgtcacaacagcgacttccggaacagaggcatgacagccctgctgaaggtgtccagctgcgacaagaacaccggcgactactacgaggacagctatgaggacatcagcgcctacctgctgagcaagaacaatgccatcgagcccagaagcttcagccagaatagcagacacccctccaccagacagaagcagttcaacgccacaacaatccccgagaacgacatcgagaaaaccgatccttggtttgcccacagaacccctatgcctaagatccagaacgtgtcctccagcgatctgctgatgctcctgagacagagccctacacctcacggactgagcctgtccgatctgcaagaggccaaatacgaaaccttcagcgacgacccttctcctggcgccatcgacagcaacaatagcctgagcgagatgacccacttcagaccacagctgcaccacagcggcgacatggtgtttacacctgagagcggcctccagctgagactgaatgagaagctgggaaccaccgccgccaccgagctgaagaaactggacttcaaggtgtcctctaccagcaacaacctgatcagcacaatcccctccgacaacctggctgccggcaccgacaacacatcttctctgggcccacctagcatgcccgtgcactacgatagccagctggataccacactgttcggcaagaagtctagccctctgacagagtctggcggccctctgtctctgagcgaggaaaacaacgacagcaagctgctggaatccggcctgatgaacagccaagagtcctcctggggcaagaatgtgtccagcaccgagtccggcagactgttcaagggaaagagagcccacggacctgctctgctgaccaaggataacgccctgttcaaagtgtccatcagcctgctcaagaccaacaagacctccaacaactccgccaccaacagaaagacccacatcgacggccctagcctgctgatcgagaatagccctagcgtctggcagaatatcctggaaagcgacaccgagttcaagaaagtgacccctctgatccacgaccggatgctcatggacaagaacgccaccgctctgcggctgaaccacatgagcaacaagacaaccagcagcaagaatatggaaatggtgcagcagaagaaagagggccccattcctccagacgctcagaaccccgatatgagcttcttcaagatgctctttctgcccgagagcgcccggtggattcagagaacacacggcaagaactccctgaactccggccagggaccttctccaaagcagctggtttccctgggacctgagaagtccgtggaaggacagaacttcctgagcgaaaagaacaaagtggtcgtcggcaagggcgagttcaccaaggatgtgggcctgaaagagatggtctttcccagcagccggaacctgttcctgaccaacctggacaacctgcacgagaacaacacccacaatcaagagaagaagatccaagaggaaatcgaaaagaaagagacactcatccaagagaacgtggtgctgcctcagatccacacagtgaccggcaccaagaactttatgaagaatctgttcctgctgagtacccggcagaacgtggaaggcagctacgatggcgcttatgcccctgtgctgcaggacttcagatccctgaacgactccaccaatcggacaaagaagcacacagcccacttctccaagaagggcgaagaagagaacctggaaggactgggcaatcagaccaagcagatcgtcgagaagtacgcctgcaccaccagaatcagccccaacacaagccagcagaacttcgtgacccagcggagcaaaagagccctgaagcagtttcggctgcccctggaagaaaccgagctggaaaagcggatcatcgtggacgacaccagcacacagtggtccaagaacatgaagcacttgacccctagcacactgacccagatcgactacaacgagaaagagaagggcgctatcacacagagcccactgagcgactgtctgaccagaagccacagcatccctcaggccaacagatcccctctgccaatcgccaaagtgtctagcttccccagcatcagacccatctacctgaccagagtgctgttccaggacaacagcagccatctgccagccgccagctaccggaagaaagattctggcgtgcaagagagcagccactttctgcagggcgctaagaagaacaatctgagcctggctattctgaccctggaaatgaccggcgatcagagagaagtcggctctctgggcaccagcgccacaaatagcgtgacctacaaaaaggtggaaaacaccgtgctgcctaagcctgacctgccaaagacaagcggcaaggtggaactgctgccaaaggtgcacatctaccagaaggacctgtttcctaccgagacaagcaacggctctcccggccatctggatctggtggaaggatctctgctgcagggaaccgagggcgccatcaagtggaacgaggccaatagacctggcaaggtgcccttcctgagagtggccacagagtccagcgccaagacaccctctaaactgctggaccctctggcctgggacaaccactatggcactcagatccccaaagaggaatggaagtcccaagagaagtcccctgaaaagaccgccttcaagaagaaggacaccattctgtccctgaatgcctgcgagagcaaccacgccattgccgccatcaatgagggccagaacaagcccgagatcgaagtgacctgggccaagcagggaagaaccgagagactgtgtagccagaatcctcctgtgctgaagcggcaccagagagaaatcacccggaccacactgcagagcgaccaagaagagatcgattacgacgataccatcagcgtcgagatgaagaaagaagatttcgacatctacgacgaggacgagaatcagagccctcggagcttccagaagaaaaccaggcactactttattgccgccgtcgagcggctgtgggactacggaatgtctagctctcctcacgtgctgcggaatagagcccagtctggtagcgtgccccagttcaaaaaggtcgtgttccaagagttcaccgacggcagcttcacccagccactgtatagaggcgagctgaacgagcatctgggcctgctgggcccttatatcagagccgaagtggaagataacatcatggtcaccttccggaatcaggctagccggccttacagcttctacagctccctgatctcctacgaagaggaccagagacagggcgcagagccccggaagaatttcgtgaagcccaacgagactaagacctacttttggaaggtgcagcaccatatggcccctacaaaggacgagttcgactgcaaagcctgggcctacttctccgatgtggacctcgaaaaggacgtgcacagcggactcatcggcccactgcttgtgtgccacaccaacacactgaaccccgctcacggcagacaagtgacagtgcaagagttcgccctgtttttcaccatcttcgacgaaacgaagtcctggtacttcaccgaaaacatggaaagaaactgcagggccccttgcaacattcagatggaagatcccaccttcaaagagaactaccggttccacgccatcaacggctacatcatggacacactgcccggcctggttatggcccaggatcagagaatccggtggtatctgctgtccatgggctccaacgagaatatccactccatccacttcagcggccacgtgttcaccgtgcggaaaaaagaagagtacaaaatggccctgtacaatctgtaccctggggtgttcgaaaccgttgagatgctgcctagcaaggccggaatttggagagtggaatgtctgattggagagcacctccacgccgggatgagcaccctgtttctggtgtactccaacaagtgtcagacccctctcggcatggcctctggccacattagagacttccagatcaccgccagcggacagtatggacagtgggcccctaaactggccagactgcactactccggcagcatcaatgcctggtccaccaaagagcctttcagctggatcaaagtggacctgctggctcccatgatcatccacggaatcaagacccagggcgccagacaaaagttcagcagcctgtacatcagccagttcatcatcatgtacagcctggacggaaagaagtggcagacctaccggggcaatagcaccggcacactgatggtgttcttcggcaacgtggactccagcggcattaagcacaacatcttcaaccctccaatcattgcccggtacatccggctgcaccccacacactacagcatcaggtctaccctgagaatggaactgatgggctgcgacctgaacagctgctctatgcccctcggaatggaaagcaaggccatcagcgacgcccagatcacagcctctagctacttcaccaacatgttcgccacttggagcccctctaaggcccggcttcatctgcaaggcagaagcaacgcttggaggccccaagtgaacaaccccaaagaatggctccaggtggactttcagaaaaccatgaaagtgacaggcgtgaccacacagggcgtcaagtccctgctgacctctatgtacgtgaaagagtttctgatcagctccagccaggacggccaccagtggaccctgttcttccagaacggcaaagtgaaagtgttccagggaaatcaggacagcttcacacccgtggtcaatagtctggacccaccactgctgacccgctacctgcgaattcaccctcagtcttgggtgcaccagattgccctgcggatggaagtgctgggctgtgaagctcaggacctctactagttaattaagagcatcttaccgccatttattcccatatttgttctgtttttcttgatttgggtatacatttaaatgttaataaaacaaaatggtggggcaatcatttacatttttagggatatgtaattactagttcaggtgtattgccacaagacaaacatgttaagaaactttcccgttatttacgctctgttcctgttaatcaacctctggattacaaaatttgtgaaagattgactgatattcttaactatgttgctccttttacgctgtgtggatatgctgctttatagcctctgtatctagctattgcttcccgtacggctttcgttttctcctccttgtataaatcctggttgctgtctcttttagaggagttgtggcccgttgtccgtcaacgtggcgtggtgtgctctgtgtttgctgacgcaacccccactggctggggcattgccaccacctgtcaactcctttctgggactttcgctttccccctcccgatcgccacggcagaactcatcgccgcctgccttgcccgctgctggacaggggctaggttgctgggcactgataattccgtggtgttgtctgtgccttctagttgccagccatctgttgtttgcccctcccccgtgccttccttgaccctggaaggtgccactcccactgtcctttcctaataaaatgaggaaattgcatcgcattgtctgagtaggtgtcattctattctggggggtggggtggggcaggacagcaagggggaggattgggaagacaatagcaggcatgctggggatgcggtgggctctatggctctagagcatggctacgtagataagtagcatggcgggttaatcattaactacacctgcaggaggaacccctagtgatggagttggccactccctctctgcgcgctcgctcgctcactgaggccgggcgaccaaaggtcgcccgacgcccgggcggcctcagtgagcgagcgagcgcgcagctgcctgcaggggcgcgcctcgaggcatgcggtaccaagcttgtcgagaagtactagaggatcataatcagccataccacatttgtagaggttttacttgctttaaaaaacctcccacacctccccctgaacctgaaacataaaatgaatgcaattgttgttgttaacttgtttattgcagcttataatggttacaaataaagcaatagcatcacaaatttcacaaataaagcatttttttcactgcattctagttgtggtttgtccaaactcatcaatgtatcttatcatgtctggatctgatcactgatatcgcctaggagatccgaaccagataagtgaaatctagttccaaactattttgtcatttttaattttcgtattagcttacgacgctacacccagttcccatctattttgtcactcttccctaaataatccttaaaaactccatttccacccctcccagttcccaactattttgtccgcccacagcggggcatttttcttcctgttatgtttttaatcaaacatcctgccaactccatgtgacaaaccgtcatcttcggctactttttctctgtcacagaatgaaaatttttctgtcatctcttcgttattaatgtttgtaattgactgaatatcaacgcttatttgcagcctgaatggcgaatgg

SEQ ID NO: 197 - DNA, 11584 bp, synthetic construct
  misc_feature 1..11584: note = Description of Artificial Sequence: Synthetic polynucleotide
  source 1..11584: mol_type = other DNA
gacgcgccctgtagcggcgcattaagcgcggcgggtgtggtggttacgcgcagcgtgaccgctacacttgccagcgccctagcgcccgctcctttcgctttcttcccttcctttctcgccacgttcgccggctttccccgtcaagctctaaatcgggggctccctttagggttccgatttagtgctttacggcacctcgaccccaaaaaacttgattagggtgatggttcacgtagtgggccatcgccctgatagacggtttttcgccctttgacgttggagtccacgttctttaatagtggactcttgttccaaactggaacaacactcaaccctatctcggtctattcttttgatttataagggattttgccgatttcggcctattggttaaaaaatgagctgatttaacaaaaatttaacgcgaattttaacaaaatattaacgtttacaatttcaggtggcacttttcggggaaatgtgcgcggaacccctatttgtttatttttctaaatacattcaaatatgtatccgctcatgagacaataaccctgataaatgcttcaataatattgaaaaaggaagagtatgagtattcaacatttccgtgtcgcccttattcccttttttgcggcattttgccttcctgtttttgctcacccagaaacgctggtgaaagtaaaagatgctgaagatcagttgggtgcacgagtgggttacatcgaactggatctcaacagcggtaagatccttgagagttttcgccccgaagaacgttttccaatgatgagcacttttaaagttctgctatgtggcgcggtattatcccgtattgacgccgggcaagagcaactcggtcgccgcatacactattctcagaatgacttggttgagtactcaccagtcacagaaaagcatcttacggatggcatgacagtaagagaattatgcagtgctgccataaccatgagtgataacactgcggccaacttacttctgacaacgatcggaggaccgaaggagctaaccgcttttttgcacaacatgggggatcatgtaactcgccttgatcgttgggaaccggagctgaatgaagccataccaaacgacgagcgtgacaccacgatgcctgtagcaatggcaacaacgttgcgcaaactattaactggcgaactacttactctagcttcccggcaacaattaatagactggatggaggcggataaagttgcaggaccacttctgcgctcggcccttccggctggctggtttattgctgataaatctggagccggtgagcgtgggtctcgcggtatcattgcagcactggggccagatggtaagccctcccgtatcgtagttatctacacgacggggagtcaggcaactatggatgaacgaaatagacagatcgctgagataggtgcctcactgattaagcattggtaactgtcagaccaagtttactcatatatactttagattgatttaaaacttcatttttaatttaaaaggatctaggtgaagatcctttttgataatctcatgaccaaaatcccttaacgtgagttttcgttccactgagcgtcagaccccgtagaaaagatcaaaggatcttcttgagatcctttttttctgcgcgtaatctgctgcttgcaaacaaaaaaaccaccgctaccagcggtggtttgtttgccggatcaagagctaccaactctttttccgaaggtaactggcttcagcagagcgcagataccaaatactgtccttctagtgtagccgtagttaggccaccacttcaagaactctgtagcaccgcctacatacctcgctctgctaatcctgttaccagtggctgctgccagtggcgataagtcgtgtcttaccgggttggactcaagacgatagttaccggataaggcgcagcggtcgggctgaacggggggttcgtgcacacagcccagcttggagcgaacgacctacaccgaactgagatacctacagcgtgagcattgagaaagcgccacgcttcccgaagggagaaaggcggacaggtatccggtaagcggcagggtcggaacaggagagcgcacgagggagcttccagggggaaacgcctggtatctttatagtcctgtcgggtttcgccacctctgacttgagcgtcgatttttgtgatgctcgtcaggggggcggagcctatggaaaaacgccagcaacgcggcctttttacggttcctggccttttgctggccttttgctcacatgttctttcctgcgttatcccctgattctgtggataaccgtattaccgcctttgagtgagctgataccgctcgccgcagccgaacgaccgagcgcagcgagtcagtgagcgaggaagcggaagagcgcctgatgcggtattttctccttacgcatctgtgcggtatttcacaccgcagaccagccgcgtaacctggcaaaatcggttacggttgagtaataaatggatgccctgcgtaagcgggtgtgggcggacaataaagtcttaaactgaacaaaatagatctaaactatgacaataaagtcttaaactagacagaatagttgtaaactgaaatcagtccagttatgctgtgaaaaagcatactggacttttgttatggctaaagcaaactcttcattttctgaagtgcaaattgcccgtcgtattaaagaggggcgtggccaagggcatggtaaagactatattcgcggcgttgtgacaatttaccgaacaactccgcggccgggaagccgatctcggcttgaacgaattgttaggtggcggtacttgggtcgatatcaaagtgcatcacttcttcccgtatgcccaactttgtatagagagccactgcgggatcgtcaccgtaatctgcttgcacgtagatcacataagcaccaagcgcgttggcctcatgcttgaggagattgatgagcgcggtggcaatgccctgcctccggtgctcgccggagactgcgagatcatagatatagatctcactacgcggctgctcaaacctgggcagaacgtaagccgcgagagcgccaacaaccgcttcttggtcgaaggcagcaagcgcgatgaatgtcttactacggagcaagttcccgaggtaatcggagtccggctgatgttgggagtaggtggctacgtctccgaactcacgaccgaaaagatcaagagcagcccgcatggatttgacttggtcagggccgagcctacatgtgcgaatgatgcccatacttgagccacctaactttgttttagggcgactgccctgctgcgtaacatcgttgctgctgcgtaacatcgttgctgctccataacatcaaacatcgacccacggcgtaacgcgcttgctgcttggatgcccgaggcatagactgtacaaaaaaacagtcataacaagccatgaaaaccgccactgcgccgttaccaccgctgcgttcggtcaaggttctggaccagttgcgtgagcgcatacgctacttgcattacagtttacgaaccgaacaggcttatgtcaactgggttcgtgccttcatccgtttccacggtgtgcgtcacccggcaaccttgggcagcagcgaagtcgaggcatttctgtcctggctggcgaacgagcgcaaggtttcggtctccacgcatcgtcaggcattggcggccttgctgttcttctacggcaaggtgctgtgcacggatctgccctggcttcaggagatcggaagacctcggccgtcgcggcgcttgccggtggtgctgaccccggatgaagtggttcgcatcctcggttttctggaaggcgagcatcgtttgttcgcccaggactctagctatagttctagtggttggctacgtatactccggaatattaatagatcatggagataattaaaatgataaccatctcgcaaataaataagtattttactgttttcgtaacagttttgtaataaaaaaacctataaatattccggattattcataccgtcccaccatcgggcgcggatctcggtccgaaaccatgtcgtactaccatcaccatcaccatcacgattacgatatcccaacgaccgaaaacctgtattttcagggcgccatgggatccggccggcccctgcaggcagctgcgcgctcgctcgctcactgaggccgcccgggcaaagcccgggcgtcgggcgacctttggtcgcccggcctcagtgagcgagcgagcgcgcagagagggagtggccaactccatcactaggggttccttgtagttaatgattaacccgccatgctacttatctacgtagccatgctctagagcggccgcggctccggtgcccgtcagtgggcagagcgcacatcgcccacagtccccgagaagttggggggaggggtcggcaattgaaccggtgcctagagaaggtggcgcggggtaaactgggaaagtgatgtcgtgtactggctccgcctttttcccgagggtgggggagaaccgtatataagtgcagtagtcgccgtgaacgttctttttcgcaacgggtttgccgccagaacacaggtaagtgccgtgtgtggttcccgcgggcctggcctctttacgggttatggcccttgcgtgccttgaattacttccacctggctgcagtacgtgattcttgatcccgagcttcgggttggaagtgggtgggagagttcgaggccttgcgcttaaggagccccttcgcctcgtgcttgagttgaggcctggcctgggcgctggggccgccgcgtgcgaatctggtggcaccttcgcgcctgtctcgctgctttcgataagtctctagccatttaaaatttttgatgacctgctgcgacgctttttttctggcaagatagtcttgtaaatgcgggccaagatctgcacactggtatttcggtttttggggccgcgggcggcgacggggcccgtgcgtcccagcgcacatgttcggcgaggcggggcctgcgagcgcggccaccgagaatcggacgggggtagtctcaagctggccggcctgctctggtgcctggtctcgcgccgccgtgtatcgccccgccctgggcggcaaggctggcccggtcggcaccagttgcgtgagcggaaagatggccgcttcccggccctgctgcagggagctcaaaatggaggacgcggcgctcgggagagcgggcgggtgagtcacccacacaaaggaaaagggcctttccgtcctcagccgtcgcttcatgtgactccacggagtaccgggcgccgtccaggcacctcgattagttctcgagcttttggagtacgtcgtctttaggttggggggaggggttttatgcgatggagtttccccacactgagtgggtggagactgaagttaggccagcttggcacttgatgtaattctccttggaatttgccctttttgagtttggatcttggttcattctcaagcctcagacagtggttcaaagtttttttcttccatttcaggtgtcgtgagtttaaaccgcagccaccatgcagatcgagctgtctacctgcttcttcctgtgcctgctgcggttctgcttcagcgccaccagaagatattacctgggcgccgtggaactgagctgggactacatgcagtctgacctgggagagctgcccgtggacgctagatttcctccaagagtgcccaagagcttccccttcaacacctccgtggtgtacaagaaaaccctgttcgtggaattcaccgaccacctgttcaatatcgccaagcctcggcctccttggatgggactgctgggacctacaattcaggccgaggtgtacgacaccgtggtcatcaccctgaagaacatggccagccatcctgtgtctctgcacgccgtgggagtgtcttattggaaggcttctgagggcgccgagtacgacgatcagacaagccagagagagaaagaggacgacaaggttttccctggcggcagccacacctatgtctggcaggtcctgaaagaaaacggccctatggcctccgatcctctgtgcctgacatacagctacctgagccacgtggacctggtcaaggacctgaattctggcctgatcggagccctgctcgtgtgtagagaaggcagcctggccaaagagaaaacccagacactgcacaagttcatcctgctgttcgccgtgttcgacgagggcaagagctggcacagcgagacaaagaacagcctgatgcaggacagggatgccgcctctgctagagcttggcctaagatgcacaccgtgaacggctacgtgaacagaagcctgcctggactgatcggctgccacagaaagtccgtgtactggcacgtgatcggcatgggcacaacacctgaggtgcacagcatctttctggaaggccacaccttcctcgtgcggaaccacagacaggccagcctggaaatcagccctatcaccttcctgaccgctcagaccctgctgatggatctgggccagtttctgctgttctgccacatcagctcccaccagcacgatggcatggaagcctacgtgaaggtggacagctgccccgaagaaccccagctgcggatgaagaacaacgaggaagccgaggactacgacgacgacctgaccgactctgagatggacgtcgtcagattcgacgacgataacagccccagcttcatccagatcagaagcgtggccaagaagcaccccaagacctgggtgcactatatcgccgccgaggaagaggactgggattacgctcctctggtgctggcccctgacgacagaagctacaagagccagtacctgaacaacggccctcagcggatcggccggaagtataagaaagtgcggttcatggcctacaccgacgagacattcaagaccagagaggccatccagcacgagagcggaattctgggccctctgctgtatggcgaagtgggcgatacactgctgatcatcttcaagaaccaggccagcagaccctacaacatctaccctcacggcatcaccgatgtgcggcccctgtattctagaaggctgcccaagggcgtgaagcacctgaaggacttccctatcctgcctggcgagattttcaagtacaagtggaccgtgaccgtggaagatggccccaccaagagcgaccctagatgtctgacacggtactacagcagcttcgtgaacatggaacgcgacctggccagcggcctgattggacctctgctgatctgctacaaagaaagcgtggaccagcggggcaaccagatcatgagcgacaagcggaacgtgatcctgtttagcgtgttcgatgagaaccggtcctggtatctgaccgagaacatccagcggtttctgcccaatcctgccggggtgcaactggaagatcctgagttccaggcaagcaacatcatgcactccatcaatggctatgtgttcgacagcctgcagctgagcgtgtgcctgcacgaagtggcctactggtacatcctgagcattggcgcccagaccgacttcctgtccgtgttctttagcggctacaccttcaagcacaagatggtgtacgaggataccctgacactgttcccattcagcggcgagacagtgttcatgagcatggaaaaccccggcctgtggattctgggctgtcacaacagcgacttccggaacagaggcatgacagccctgctgaaggtgtccagctgcgacaagaacaccggcgactactacgaggacagctatgaggacatcagcgcctacctgctgagcaagaacaatgccatcgagcctcggagcttcagccagaatcctcctgtgctgaagcggcaccagcgcgagatcaccagaacaaccctgcagagcgaccaagaggaaatcgattacgacgacaccatcagcgtcgagatgaagaaagaagatttcgacatctacgacgaggacgagaatcagagccccagaagctttcagaaaaagacccggcactacttcattgccgccgtcgagagactgtgggactacggcatgtctagcagccctcacgtgctgagaaatagagcccagagcggcagcgtgccccagttcaagaaagtggtgttccaagagttcaccgacggcagcttcacccagccactgtatagaggcgagctgaacgagcatctgggcctgctgggcccttatatcagagccgaagtggaagataacatcatggtcaccttccggaatcaggctagccggccttacagcttctacagctccctgatcagctacgaagaggaccagagacagggcgctgagcccagaaagaacttcgtgaagcccaacgagactaagacctacttttggaaggtgcagcaccacatggcccctacaaaggacgagttcgactgcaaagcctgggcctacttctccgatgtggatctggaaaaggacgtgcacagcgggctcatcggaccactgcttgtgtgccacaccaacacactgaaccccgctcacggcagacaagtgacagtgcaagagttcgccctgttcttcaccatcttcgacgaaacaaagagctggtacttcaccgagaatatggaacggaactgcagagccccttgcaacatccagatggaagatcccaccttcaaagagaactaccggttccacgccatcaacggctacatcatggacacactgcccggcctggttatggcccaggatcagagaatccggtggtatctgctgtccatgggctccaacgagaatatccacagcatccacttcagcggccacgtgttcaccgtgcggaaaaaagaagagtacaaaatggccctgtacaatctgtaccctggggtgttcgaaaccgtggaaatgctgccttccaaggccggcatttggagagtggaatgtctgattggagagcacctccacgccggaatgagcaccctgtttctggtgtacagcaacaagtgtcagacccctctcggcatggcctctggacacatcagagacttccagatcaccgcctctggccagtacggacagtgggctcctaaactggctcggctgcactacagcggcagcatcaatgcctggtccaccaaagagcccttcagctggatcaaggtggacctgctggctcccatgatcatccacggaatcaagacccagggcgccagacagaagttcagcagcctgtacatcagccagttcatcatcatgtacagcctggacggcaagaagtggcagacctacagaggcaacagcaccggcacactcatggtgttcttcggcaacgtggactccagcggcattaagcacaacatcttcaaccctccaatcattgcccggtacatccggctgcaccccacacactacagcatccggtctaccctgagaatggaactgatgggctgcgacctgaacagctgctctatgcccctcggaatggaaagcaaggccatcagcgacgcccagatcacagccagcagctacttcaccaacatgttcgccacttggagcccctccaaggctagactgcatctgcagggcagaagcaacgcttggaggccccaagtgaacaaccccaaagagtggctgcaggttgactttcaaaagaccatgaaagtgaccggcgtgaccacacagggcgtcaagtctctgctgacctctatgtacgtgaaagagttcctgatctccagcagccaggacggccatcagtggaccctgtttttccagaacggcaaagtgaaagtgttccagggcaatcaggacagcttcacacccgtggtcaattctctggaccctccactgctgaccagatacctgcggattcaccctcagtcttgggtgcaccagatcgctctgcggatggaagtgctgggctgtgaagctcaggacctctactagttaattaagagcatcttaccgccatttattcccatatttgttctgtttttcttgatttgggtatacatttaaatgttaataaaacaaaatggtggggcaatcatttacatttttagggatatgtaattactagttcaggtgtattgccacaagacaaacatgttaagaaactttcccgttatttacgctctgttcctgttaatcaacctctggattacaaaatttgtgaaagattgactgatattcttaactatgttgctccttttacgctgtgtggatatgctgctttatagcctctgtatctagctattgcttcccgtacggctttcgttttctcctccttgtataaatcctggttgctgtctcttttagaggagttgtggcccgttgtccgtcaacgtggcgtggtgtgctctgtgtttgctgacgcaacccccactggctggggcattgccaccacctgtcaactcctttctgggactttcgctttccccctcccgatcgccacggcagaactcatcgccgcctgccttgcccgctgctggacaggggctaggttgctgggcactgataattccgtggtgttgtctgtgccttctagttgccagccatctgttgtttgcccctcccccgtgccttccttgaccctggaaggtgccactcccactgtcctttcctaataaaatgaggaaattgcatcgcattgtctgagtaggtgtcattctattctggggggtggggtggggcaggacagcaagggggaggattgggaagacaatagcaggcatgctggggatgcggtgggctctatggctctagagcatggctacgtagataagtagcatggcgggttaatcattaactacacctgcaggaggaacccctagtgatggagttggccactccctctctgcgcgctcgctcgctcactgaggccgggcgaccaaaggtcgcccgacgcccgggcggcctcagtgagcgagcgagcgcgcagctgcctgcaggggcgcgcctcgaggcatgcggtaccaagcttgtcgagaagtactagaggatcataatcagccataccacatttgtagaggttttacttgctttaaaaaacctcccacacctccccctgaacctgaaacataaaatgaatgcaattgttgttgttaacttgtttattgcagcttataatggttacaaataaagcaatagcatcacaaatttcacaaataaagcatttttttcactgcattctagttgtggtttgtccaaactcatcaatgtatcttatcatgtctggatctgatcactgatatcgcctaggagatccgaaccagataagtgaaatctagttccaaactattttgtcatttttaattttcgtattagcttacgacgctacacccagttcccatctattttgtcactcttccctaaataatccttaaaaactccatttccacccctcccagttcccaactattttgtccgcccacagcggggcatttttcttcctgttatgtttttaatcaaacatcctgccaactccatgtgacaaaccgtcatcttcggctactttttctctgtcacagaatgaaaatttttctgtcatctcttcgttattaatgtttgtaattgactgaatatcaacgcttatttgcagcctgaatggcgaatgg

SEQ ID NO: 198 - DNA, 11558 bp, synthetic construct
  misc_feature 1..11558: note = Description of Artificial Sequence: Synthetic polynucleotide
  source 1..11558: mol_type = other DNA
gacgcgccctgtagcggcgcattaagcgcggcgggtgtggtggttacgcgcagcgtgaccgctacacttgccagcgccctagcgcccgctcctttcgctttcttcccttcctttctcgccacgttcgccggctttccccgtcaagctctaaatcgggggctccctttagggttccgatttagtgctttacggcacctcgaccccaaaaaacttgattagggtgatggttcacgtagtgggccatcgccctgatagacggtttttcgccctttgacgttggagtccacgttctttaatagtggactcttgttccaaactggaacaacactcaaccctatctcggtctattcttttgatttataagggattttgccgatttcggcctattggttaaaaaatgagctgatttaacaaaaatttaacgcgaattttaacaaaatattaacgtttacaatttcaggtggcacttttcggggaaatgtgcgcggaacccctatttgtttatttttctaaatacattcaaatatgtatccgctcatgagacaataaccctgataaatgcttcaataatattgaaaaaggaagagtatgagtattcaacatttccgtgtcgcccttattcccttttttgcggcattttgccttcctgtttttgctcacccagaaacgctggtgaaagtaaaagatgctgaagatcagttgggtgcacgagtgggttacatcgaactggatctcaacagcggtaagatccttgagagttttcgccccgaagaacgttttccaatgatgagcacttttaaagttctgctatgtggcgcggtattatcccgtattgacgccgggcaagagcaactcggtcgccgcatacactattctcagaatgacttggttgagtactcaccagtcacagaaaagcatcttacggatggcatgacagtaagagaattatgcagtgctgccataaccatgagtgataacactgcggccaacttacttctgacaacgatcggaggaccgaaggagctaaccgcttttttgcacaacatgggggatcatgtaactcgccttgatcgttgggaaccggagctgaatgaagccataccaaacgacgagcgtgacaccacgatgcctgtagcaatggcaacaacgttgcgcaaactattaactggcgaactacttactctagcttcccggcaacaattaatagactggatggaggcggataaagttgcaggaccacttctgcgctcggcccttccggctggctggtttattgctgataaatctggagccggtgagcgtgggtctcgcggtatcattgcagcactggggccagatggtaagccctcccgtatcgtagttatctacacgacggggagtcaggcaactatggatgaacgaaatagacagatcgctgagataggtgcctcactgattaagcattggtaactgtcagaccaagtttactcatatatactttagattgatttaaaacttcatttttaatttaaaaggatctaggtgaagatcctttttgataatctcatgaccaaaatcccttaacgtgagttttcgttccactgagcgtcagaccccgtagaaaagatcaaaggatcttcttgagatcctttttttctgcgcgtaatctgctgcttgcaaacaaaaaaaccaccgctaccagcggtggtttgtttgccggatcaagagctaccaactctttttccgaaggtaactggcttcagcagagcgcagataccaaatactgtccttctagtgtagccgtagttaggccaccacttcaagaactctgtagcaccgcctacatacctcgctctgctaatcctgttaccagtggctgctgccagtggcgataagtcgtgtcttaccgggttggactcaagacgatagttaccggataaggcgcagcggtcgggctgaacggggggttcgtgcacacagcccagcttggagcgaacgacctacaccgaactgagatacctacagcgtgagcattgagaaagcgccacgcttcccgaagggagaaaggcggacaggtatccggtaagcggcagggtcggaacaggagagcgcacgagggagcttccagggggaaacgcctggtatctttatagtcctgtcgggtttcgccacctctgacttgagcgtcgatttttgtgatgctcgtcaggggggcggagcctatggaaaaacgccagcaacgcggcctttttacggttcctggccttttgctggccttttgctcacatgttctttcctgcgttatcccctgattctgtggataaccgtattaccgcctttgagtgagctgataccgctcgccgcagccgaacgaccgagcgcagcgagtcagtgagcgaggaagcggaagagcgcctgatgcggtattttctccttacgcatctgtgcggtatttcacaccgcagaccagccgcgtaacctggcaaaatcggttacggttgagtaataaatggatgccctgcgtaagcgggtgtgggcggacaataaagtcttaaactgaacaaaatagatctaaactatgacaataaagtcttaaactagacagaatagttgtaaactgaaatcagtccagttatgctgtgaaaaagcatactggacttttgttatggctaaagcaaactcttcattttctgaagtgcaaattgcccgtcgtattaaagaggggcgtggccaagggcatggtaaagactatattcgcggcgttgtgacaatttaccgaacaactccgcggccgggaagccgatctcggcttgaacgaattgttaggtggcggtacttgggtcgatatcaaagtgcatcacttcttcccgtatgcccaactttgtatagagagccactgcgggatcgtcaccgtaatctgcttgcacgtagatcacataagcaccaagcgcgttggcctcatgcttgaggagattgatgagcgcggtggcaatgccctgcctccggtgctcgccggagactgcgagatcatagatatagatctcactacgcggctgctcaaacctgggcagaacgtaagccgcgagagcgccaacaaccgcttcttggtcgaaggcagcaagcgcgatgaatgtcttactacggagcaagttcccgaggtaatcggagtccggctgatgttgggagtaggtggctacgtctccgaactcacgaccgaaaagatcaagagcagcccgcatggatttgacttggtcagggccgagcctacatgtgcgaatgatgcccatacttgagccacctaactttgttttagggcgactgccctgctgcgtaacatcgttgctgctgcgtaacatcgttgctgctccataacatcaaacatcgacccacggcgtaacgcgcttgctgcttggatgcccgaggcatagactgtacaaaaaaacagtcataacaagccatgaaaaccgccactgcgccgttaccaccgctgcgttcggtcaaggttctggaccagttgcgtgagcgcatacgctacttgcattacagtttacgaaccgaacaggcttatgtcaactgggttcgtgccttcatccgtttccacggtgtgcgtcacccggcaaccttgggcagcagcgaagtcgaggcatttctgtcctggctggcgaacgagcgcaaggtttcggtctccacgcatcgtcaggcattggcggccttgctgttcttctacggcaaggtgctgtgcacggatctgccctggcttcaggagatcggaagacctcggccgtcgcggcgcttgccggtggtgctgaccccggatgaagtggttcgcatcctcggttttctggaaggcgagcatcgtttgttcgcccaggactctagctatagttctagtggttggctacgtatactccggaatattaatagatcatggagataattaaaatgataaccatctcgcaaataaataagtattttactgttttcgtaacagttttgtaataaaaaaacctataaatattccggattattcataccgtcccaccatcgggcgcggatctcggtccgaaaccatgtcgtactaccatcaccatcaccatcacgattacgatatcccaacgaccgaaaacctgtattttcagggcgccatgggatccggccggcccctgcaggcagctgcgcgctcgctcgctcactgaggccgcccgggcaaagcccgggcgtcgggcgacctttggtcgcccggcctcagtgagcgagcgagcgcgcagagagggagtggccaactccatcactaggggttccttgtagttaatgattaacccgccatgctacttatctacgtagccatgctctagagcggccgcccctaaaatgggcaaacattgcaagcagcaaacagcaaacacacagccctccctgcctgctgaccttggagctggggcagaggtcagagacctctctgggcccatgccacctccaacatccactcgaccccttggaatttttcggtggagaggagcagaggttgtcctggcgtggtttaggtagtgtgagaggggaatgactcctttcggtaagtgcagtggaagctgtacactgcccaggcaaagcgtccgggcagcgtaggcgggcgactcagatcccagccagtggacttagcccctgtttgctcctccgataactggggtgaccttggttaatattcaccagcagcctcccccgttgcccctctggatccactgcttaaatacggacgaggacagggccctgtctcctcagcttcaggcaccaccactgacctgggacagtgaatccggactctaaggtaaatataaaatttttaagtgtataatgtgttaaactactgattctaattgtttctctcttttagattccaacctttggaactgagtttaaaccgcagccaccatgcagatcgagctgtctacctgcttcttcctgtgcctgctgcggttctgcttcagcgccaccagaagatattacctgggcgccgtggaactgagctgggactacatgcagtctgacctgggagagctgcccgtggacgctagatttcctccaagagtgcccaagagcttccccttcaacacctccgtggtgtacaagaaaaccctgttcgtggaattcaccgaccacctgttcaatatcgccaagcctcggcctccttggatgggactgctgggacctacaattcaggccgaggtgtacgacaccgtggtcatcaccctgaagaacatggccagccatcctgtgtctctgcacgccgtgggagtgtcttattggaaggcttctgagggcgccgagtacgacgatcagacaagccagagagagaaagaggacgacaaggttttccctggcggcagccacacctatgtctggcaggtcctgaaagaaaacggccctatggcctccgatcctctgtgcctgacatacagctacctgagccacgtggacctggtcaaggacctgaattctggcctgatcggagccctgctcgtgtgtagagaaggcagcctggccaaagagaaaacccagacactgcacaagttcatcctgctgttcgccgtgttcgacgagggcaagagctggcacagcgagacaaagaacagcctgatgcaggacagggatgccgcctctgctagagcttggcctaagatgcacaccgtgaacggctacgtgaacagaagcctgcctggactgatcggctgccacagaaagtccgtgtactggcacgtgatcggcatgggcacaacacctgaggtgcacagcatctttctggaaggccacaccttcctcgtgcggaaccacagacaggccagcctggaaatcagccctatcaccttcctgaccgctcagaccctgctgatggatctgggccagtttctgctgttctgccacatcagctcccaccagcacgatggcatggaagcctacgtgaaggtggacagctgccccgaagaaccccagctgcggatgaagaacaacgaggaagccgaggactacgacgacgacctgaccgactctgagatggacgtcgtcagattcgacgacgataacagccccagcttcatccagatcagaagcgtggccaagaagcaccccaagacctgggtgcactatatcgccgccgaggaagaggactgggattacgctcctctggtgctggcccctgacgacagaagctacaagagccagtacctgaacaacggccctcagcggatcggccggaagtataagaaagtgcggttcatggcctacaccgacgagacattcaagaccagagaggccatccagcacgagagcggaattctgggccctctgctgtatggcgaagtgggcgatacactgctgatcatcttcaagaaccaggccagcagaccctacaacatctaccctcacggcatcaccgatgtgcggcccctgtattctagaaggctgcccaagggcgtgaagcacctgaaggacttccctatcctgcctggcgagattttcaagtacaagtggaccgtgaccgtggaagatggccccaccaagagcgaccctagatgtctgacacggtactacagcagcttcgtgaacatggaacgcgacctggccagcggcctgattggacctctgctgatctgctacaaagaaagcgtggaccagcggggcaaccagatcatgagcgacaagcggaacgtgatcctgtttagcgtgttcgatgagaaccggtcctggtatctgaccgagaacatccagcggtttctgcccaatcctgccggggtgcaactggaagatcctgagttccaggcaagcaacatcatgcactccatcaatggctatgtgttcgacagcctgcagctgagcgtgtgcctgcacgaagtggcctactggtacatcctgagcattggcgcccagaccgacttcctgtccgtgttctttagcggctacaccttcaagcacaagatggtgtacgaggataccctgacactgttcccattcagcggcgagacagtgttcatgagcatggaaaaccccggcctgtggattctgggctgtcacaacagcgacttccggaacagaggcatgacagccctgctgaaggtgtccagctgcgacaagaacaccggcgactactacgaggacagctatgaggacatcagcgcctacctgctgagcaagaacaatgccatcgagcccagaagcttcagccagaatagcagacacccctccaccagacagaagcagttcaacgccacaacaatccccgagaacgacatcgagaaaaccgatccttggtttgcccacagaacccctatgcctaagatccagaacgtgtcctccagcgatctgctgatgctcctgagacagagccctacacctcacggactgagcctgtccgatctgcaagaggccaaatacgaaaccttcagcgacgacccttctcctggcgccatcgacagcaacaatagcctgagcgagatgacccacttcagaccacagctgcaccacagcggcgacatggtgtttacacctgagagcggcctccagctgagactgaatgagaagctgggaaccaccgccgccaccgagctgaagaaactggacttcaaggtgtcctctaccagcaacaacctgatcagcacaatcccctccgacaacctggctgccggcaccgacaacacatcttctctgggcccacctagcatgcccgtgcactacgatagccagctggataccacactgttcggcaagaagtctagccctctgacagagtctggcggccctctgtctctgagcgaggaaaacaacgacagcaagctgcctcctgtgctgaagcggcaccagcgggaaatcaccagaaccacactgcagagcgaccaagaggaaatcgattacgacgacaccatcagcgtcgagatgaagaaagaagatttcgacatctacgacgaggacgagaatcagagccccagatcctttcagaaaaagacccggcactacttcattgccgccgtcgagagactgtgggactacggcatgtctagcagccctcacgtgctgagaaatagagcccagagcggcagcgtgccccagttcaagaaagtggtgttccaagagttcaccgacggcagcttcacccagccactgtatagaggcgagctgaacgagcatctgggcctgctgggcccttatatcagagccgaagtggaagataacatcatggtcaccttccggaatcaggctagccggccttacagcttctacagctccctgatctcctacgaagaggaccagagacagggcgctgagccccggaagaatttcgtgaagcccaacgagactaagacctacttttggaaggtgcagcaccacatggcccctacaaaggacgagttcgactgcaaagcctgggcctacttctccgatgtggatctggaaaaggacgtgcacagcgggctcatcggaccactgcttgtgtgccacaccaacacactgaaccccgctcacggcagacaagtgacagtgcaagagttcgccctgttcttcaccatcttcgacgaaacaaagagctggtacttcaccgagaatatggaacggaactgcagggccccttgcaacatccagatggaagatcccaccttcaaagagaactaccggttccacgccatcaacggctacatcatggacacactgcccggcctggttatggcccaggatcagagaatccggtggtatctgctgtccatgggctccaacgagaatatccacagcatccacttcagcggccacgtgttcaccgtgcggaaaaaagaagagtacaaaatggccctgtacaatctgtaccctggggtgttcgaaaccgtggaaatgctgccttccaaggccggcatttggagagtggaatgtctgattggagagcacctccacgccggaatgagcaccctgtttctggtgtactccaacaagtgtcagacccctctcggcatggcctctggacacatcagagacttccagatcaccgcctctggccagtacggacagtgggctcctaaactggctcggctgcactactccggcagcatcaatgcctggtccaccaaagagcccttcagctggatcaaggtggacctgctggctcccatgatcatccacggaatcaagacccagggcgcaagacagaagttcagcagcctgtacatcagccagttcatcatcatgtacagcctggacggaaagaagtggcagacctaccggggcaatagcaccggcacactcatggtgttcttcggcaacgtggactccagcggcattaagcacaacatcttcaaccctccaatcattgcccggtacatccggctgcaccccacacactacagcatccggtctaccctgagaatggaactgatgggctgcgacctgaacagctgctctatgcccctcggaatggaaagcaaggccatcagcgacgcccagatcacagccagcagctacttcaccaacatgttcgccacttggagcccctccaaggctagactgcatctgcagggcagaagcaacgcttggaggccccaagtgaacaaccccaaagagtggctgcaggttgactttcaaaagaccatgaaagtgaccggcgtgaccacacagggcgtcaagtctctgctgacctctatgtacgtgaaagagttcctgattagcagcagccaggacggccaccagtggaccctgtttttccagaacggcaaagtgaaagtgttccagggcaatcaggacagcttcacacccgtggtcaattctctggaccctccactgctgaccagatacctgcggattcaccctcagtcttgggtgcaccagatcgctctgcggatggaagtgctgggctgtgaagctcaggacctctactagttaattaagagcatcttaccgccatttattcccatatttgttctgtttttcttgatttgggtatacatttaaatgttaataaaacaaaatggtggggcaatcatttacatttttagggatatgtaattactagttcaggtgtattgccacaagacaaacatgttaagaaactttcccgttatttacgctctgttcctgttaatcaacctctggattacaaaatttgtgaaagattgactgatattcttaactatgttgctccttttacgctgtgtggatatgctgctttatagcctctgtatctagctattgcttcccgtacggctttcgttttctcctccttgtataaatcctggttgctgtctcttttagaggagttgtggcccgttgtccgtcaacgtggcgtggtgtgctctgtgtttgctgacgcaacccccactggctggggcattgccaccacctgtcaactcctttctgggactttcgctttccccctcccgatcgccacggcagaactcatcgccgcctgccttgcccgctgctggacaggggctaggttgctgggcactgataattccgtggtgttgtctgtgccttctagttgccagccatctgttgtttgcccctcccccgtgccttccttgaccctggaaggtgccactcccactgtcctttcctaataaaatgaggaaattgcatcgcattgtctgagtaggtgtcattctattctggggggtggggtggggcaggacagcaagggggaggattgggaagacaatagcaggcatgctggggatgcggtgggctctatggctctagagcatggctacgtagataagtagcatggcgggttaatcattaactacacctgcaggaggaacccctagtgatggagttggccactccctctctgcgcgctcgctcgctcactgaggccgggcgaccaaaggtcgcccgacgcccgggcggcctcagtgagcgagcgagcgcgcagctgcctgcaggggcgcgcctcgaggcatgcggtaccaagcttgtcgagaagtactagaggatcataatcagccataccacatttgtagaggttttacttgctttaaaaaacctcccacacctccccctgaacctgaaacataaaatgaatgcaattgttgttgttaacttgtttattgcagcttataatggttacaaataaagcaatagcatcacaaatttcacaaataaagcatttttttcactgcattctagttgtggtttgtccaaactcatcaatgtatcttatcatgtctggatctgatcactgatatcgcctaggagatccgaaccagataagtgaaatctagttccaaactattttgtcatttttaattttcgtattagcttacgacgctacacccagttcccatctattttgtcactcttccctaaataatccttaaaaactccatttccacccctcccagttcccaactattttgtccgcccacagcggggcatttttcttcctgttatgtttttaatcaaacatcctgccaactccatgtgacaaaccgtcatcttcggctactttttctctgtcacagaatgaaaatttttctgtcatctcttcgttattaatgtttgtaattgactgaatatcaacgcttatttgcagcctgaatggcgaatgg

SEQ ID NO: 199 - DNA, 12190 bp, synthetic construct
  misc_feature 1..12190: note = Description of Artificial Sequence: Synthetic polynucleotide
  source 1..12190: mol_type = other DNA
gacgcgccctgtagcggcgcattaagcgcggcgggtgtggtggttacgcgcagcgtgaccgctacacttgccagcgccctagcgcccgctcctttcgctttcttcccttcctttctcgccacgttcgccggctttccccgtcaagctctaaatcgggggctccctttagggttccgatttagtgctttacggcacctcgaccccaaaaaacttgattagggtgatggttcacgtagtgggccatcgccctgatagacggtttttcgccctttgacgttggagtccacgttctttaatagtggactcttgttccaaactggaacaacactcaaccctatctcggtctattcttttgatttataagggattttgccgatttcggcctattggttaaaaaatgagctgatttaacaaaaatttaacgcgaattttaacaaaatattaacgtttacaatttcaggtggcacttttcggggaaatgtgcgcggaacccctatttgtttatttttctaaatacattcaaatatgtatccgctcatgagacaataaccctgataaatgcttcaataatattgaaaaaggaagagtatgagtattcaacatttccgtgtcgcccttattcccttttttgcggcattttgccttcctgtttttgctcacccagaaacgctggtgaaagtaaaagatgctgaagatcagttgggtgcacgagtgggttacatcgaactggatctcaacagcggtaagatccttgagagttttcgccccgaagaacgttttccaatgatgagcacttttaaagttctgctatgtggcgcggtattatcccgtattgacgccgggcaagagcaactcggtcgccgcatacactattctcagaatgacttggttgagtactcaccagtcacagaaaagcatcttacggatggcatgacagtaagagaattatgcagtgctgccataaccatgagtgataacactgcggccaacttacttctgacaacgatcggaggaccgaaggagctaaccgcttttttgcacaacatgggggatcatgtaactcgccttgatcgttgggaaccggagctgaatgaagccataccaaacgacgagcgtgacaccacgatgcctgtagcaatggcaacaacgttgcgcaaactattaactggcgaactacttactctagcttcccggcaacaattaatagactggatggaggcggataaagttgcaggaccacttctgcgctcggcccttccggctggctggtttattgctgataaatctggagccggtgagcgtgggtctcgcggtatcattgcagcactggggccagatggtaagccctcccgtatcgtagttatctacacgacggggagtcaggcaactatggatgaacgaaatagacagatcgctgagataggtgcctcactgattaagcattggtaactgtcagaccaagtttactcatatatactttagattgatttaaaacttcatttttaatttaaaaggatctaggtgaagatcctttttgataatctcatgaccaaaatcccttaacgtgagttttcgttccactgagcgtcagaccccgtagaaaagatcaaaggatcttcttgagatcctttttttctgcgcgtaatctgctgcttgcaaacaaaaaaaccaccgctaccagcggtggtttgtttgccggatcaagagctaccaactctttttccgaaggtaactggcttcagcagagcgcagataccaaatactgtccttctagtgtagccgtagttaggccaccacttcaagaactctgtagcaccgcctacatacctcgctctgctaatcctgttaccagtggctgctgccagtggcgataagtcgtgtcttaccgggttggactcaagacgatagttaccggataaggcgcagcggtcgggctgaacggggggttcgtgcacacagcccagcttggagcgaacgacctacaccgaactgagatacctacagcgtgagcattgagaaagcgccacgcttcccgaagggagaaaggcggacaggtatccggtaagcggcagggtcggaacaggagagcgcacgagggagcttccagggggaaacgcctggtatctttatagtcctgtcgggtttcgccacctctgacttgagcgtcgatttttgtgatgctcgtcaggggggcggagcctatggaaaaacgccagcaacgcggcctttttacggttcctggccttttgctggccttttgctcacatgttctttcctgcgttatcccctgattctgtggataaccgtattaccgcctttgagtgagctgataccgctcgccgcagccgaacgaccgagcgcagcgagtcagtgagcgaggaagcggaagagcgcctgatgcggtattttctccttacgcatctgtgcggtatttcacaccgcagaccagccgcgtaacctggcaaaatcggttacggttgagtaataaatggatgccctgcgtaagcgggtgtgggcggacaataaagtcttaaactgaacaaaatagatctaaactatgacaataaagtcttaaactagacagaatagttgtaaactgaaatcagtccagttatgctgtgaaaaagcatactggacttttgttatggctaaagcaaactcttcattttctgaagtgcaaattgcccgtcgtattaaagaggggcgtggccaagggcatggtaaagactatattcgcggcgttgtgacaatttaccgaacaactccgcggccgggaagccgatctcggcttgaacgaattgttaggtggcggtacttgggtcgatatcaaagtgcatcacttcttcccgtatgcccaactttgtatagagagccactgcgggatcgtcaccgtaatctgcttgcacgtagatcacataagcaccaagcgcgttggcctcatgcttgaggagattgatgagcgcggtggcaatgccctgcctccggtgctcgccggagactgcgagatcatagatatagatctcactacgcggctgctcaaacctgggcagaacgtaagccgcgagagcgccaacaaccgcttcttggtcgaaggcagcaagcgcgatgaatgtcttactacggagcaagttcccgaggtaatcggagtccggctgatgttgggagtaggtggctacgtctccgaactcacgaccgaaaagatcaagagcagcccgcatggatttgacttggtcagggccgagcctacatgtgcgaatgatgcccatacttgagccacctaactttgttttagggcgactgccctgctgcgtaacatcgttgctgctgcgtaacatcgttgctgctccataacatcaaacatcgacccacggcgtaacgcgcttgctgcttggatgcccgaggcatagactgtacaaaaaaacagtcataacaagccatgaaaaccgccactgcgccgttaccaccgctgcgttcggtcaaggttctggaccagttgcgtgagcgcatacgctacttgcattacagtttacgaaccgaacaggcttatgtcaactgggttcgtgccttcatccgtttccacggtgtgcgtcacccggcaaccttgggcagcagcgaagtcgaggcatttctgtcctggctggcgaacgagcgcaaggtttcggtctccacgcatcgtcaggcattggcggccttgctgttcttctacggcaaggtgctgtgcacggatctgccctggcttcaggagatcggaagacctcggccgtcgcggcgcttgccggtggtgctgaccccggatgaagtggttcgcatcctcggttttctggaaggcgagcatcgtttgttcgcccaggactctagctatagttctagtggttggctacgtatactccggaatattaatagatcatggagataattaaaatgataaccatctcgcaaataaataagtattttactgttttcgtaacagttttgtaataaaaaaacctataaatattccggattattcataccgtcccaccatcgggcgcggatctcggtccgaaaccatgtcgtactaccatcaccatcaccatcacgattacgatatcccaacgaccgaaaacctgtattttcagggcgccatgggatccggccggcccctgcaggcagctgcgcgctcgctcgctcactgaggccgcccgggcaaagcccgggcgtcgggcgacctttggtcgcccggcctcagtgagcgagcgagcgcgcagagagggagtggccaactccatcactaggggttccttgtagttaatgattaacccgccatgctacttatctacgtagccatgctctagagcggccgcggctccggtgcccgtcagtgggcagagcgcacatcgcccacagtccccgagaagttggggggaggggtcggcaattgaaccggtgcctagagaaggtggcgcggggtaaactgggaaagtgatgtcgtgtactggctccgcctttttcccgagggtgggggagaaccgtatataagtgcagtagtcgccgtgaacgttctttttcgcaacgggtttgccgccagaacacaggtaagtgccgtgtgtggttcccgcgggcctggcctctttacgggttatggcccttgcgtgccttgaattacttccacctggctgcagtacgtgattcttgatcccgagcttcgggttggaagtgggtgggagagttcgaggccttgcgcttaaggagccccttcgcctcgtgcttgagttgaggcctggcctgggcgctggggccgccgcgtgcgaatctggtggcaccttcgcgcctgtctcgctgctttcgataagtctctagccatttaaaatttttgatgacctgctgcgacgctttttttctggcaagatagtcttgtaaatgcgggccaagatctgcacactggtatttcggtttttggggccgcgggcggcgacggggcccgtgcgtcccagcgcacatgttcggcgaggcggggcctgcgagcgcggccaccgagaatcggacgggggtagtctcaagctggccggcctgctctggtgcctggtctcgcgccgccgtgtatcgccccgccctgggcggcaaggctggcccggtcggcaccagttgcgtgagcggaaagatggccgcttcccggccctgctgcagggagctcaaaatggaggacgcggcgctcgggagagcgggcgggtgagtcacccacacaaaggaaaagggcctttccgtcctcagccgtcgcttcatgtgactccacggagtaccgggcgccgtccaggcacctcgattagttctcgagcttttggagtacgtcgtctttaggttggggggaggggttttatgcgatggagtttccccacactgagtgggtggagactgaagttaggccagcttggcacttgatgtaattctccttggaatttgccctttttgagtttggatcttggttcattctcaagcctcagacagtggttcaaagtttttttcttccatttcaggtgtcgtgagtttaaaccgcagccaccatgcagatcgagctgtctacctgcttcttcctgtgcctgctgcggttctgcttcagcgccaccagaagatattacctgggcgccgtggaactgagctgggactacatgcagtctgacctgggagagctgcccgtggacgctagatttcctccaagagtgcccaagagcttccccttcaacacctccgtggtgtacaagaaaaccctgttcgtggaattcaccgaccacctgttcaatatcgccaagcctcggcctccttggatgggactgctgggacctacaattcaggccgaggtgtacgacaccgtggtcatcaccctgaagaacatggccagccatcctgtgtctctgcacgccgtgggagtgtcttattggaaggcttctgagggcgccgagtacgacgatcagacaagccagagagagaaagaggacgacaaggttttccctggcggcagccacacctatgtctggcaggtcctgaaagaaaacggccctatggcctccgatcctctgtgcctgacatacagctacctgagccacgtggacctggtcaaggacctgaattctggcctgatcggagccctgctcgtgtgtagagaaggcagcctggccaaagagaaaacccagacactgcacaagttcatcctgctgttcgccgtgttcgacgagggcaagagctggcacagcgagacaaagaacagcctgatgcaggacagggatgccgcctctgctagagcttggcctaagatgcacaccgtgaacggctacgtgaacagaagcctgcctggactgatcggctgccacagaaagtccgtgtactggcacgtgatcggcatgggcacaacacctgaggtgcacagcatctttctggaaggccacaccttcctcgtgcggaaccacagacaggccagcctggaaatcagccctatcaccttcctgaccgctcagaccctgctgatggatctgggccagtttctgctgttctgccacatcagctcccaccagcacgatggcatggaagcctacgtgaaggtggacagctgccccgaagaaccccagctgcggatgaagaacaacgaggaagccgaggactacgacgacgacctgaccgactctgagatggacgtcgtcagattcgacgacgataacagccccagcttcatccagatcagaagcgtggccaagaagcaccccaagacctgggtgcactatatcgccgccgaggaagaggactgggattacgctcctctggtgctggcccctgacgacagaagctacaagagccagtacctgaacaacggccctcagcggatcggccggaagtataagaaagtgcggttcatggcctacaccgacgagacattcaagaccagagaggccatccagcacgagagcggaattctgggccctctgctgtatggcgaagtgggcgatacactgctgatcatcttcaagaaccaggccagcagaccctacaacatctaccctcacggcatcaccgatgtgcggcccctgtattctagaaggctgcccaagggcgtgaagcacctgaaggacttccctatcctgcctggcgagattttcaagtacaagtggaccgtgaccgtggaagatggccccaccaagagcgaccctagatgtctgacacggtactacagcagcttcgtgaacatggaacgcgacctggccagcggcctgattggacctctgctgatctgctacaaagaaagcgtggaccagcggggcaaccagatcatgagcgacaagcggaacgtgatcctgtttagcgtgttcgatgagaaccggtcctggtatctgaccgagaacatccagcggtttctgcccaatcctgccggggtgcaactggaagatcctgagttccaggcaagcaacatcatgcactccatcaatggctatgtgttcgacagcctgcagctgagcgtgtgcctgcacgaagtggcctactggtacatcctgagcattggcgcccagaccgacttcctgtccgtgttctttagcggctacaccttcaagcacaagatggtgtacgaggataccctgacactgttcccattcagcggcgagacagtgttcatgagcatggaaaaccccggcctgtggattctgggctgtcacaacagcgacttccggaacagaggcatgacagccctgctgaaggtgtccagctgcgacaagaacaccggcgactactacgaggacagctatgaggacatcagcgcctacctgctgagcaagaacaatgccatcgagcccagaagcttcagccagaatagcagacacccctccaccagacagaagcagttcaacgccacaacaatccccgagaacgacatcgagaaaaccgatccttggtttgcccacagaacccctatgcctaagatccagaacgtgtcctccagcgatctgctgatgctcctgagacagagccctacacctcacggactgagcctgtccgatctgcaagaggccaaatacgaaaccttcagcgacgacccttctcctggcgccatcgacagcaacaatagcctgagcgagatgacccacttcagaccacagctgcaccacagcggcgacatggtgtttacacctgagagcggcctccagctgagactgaatgagaagctgggaaccaccgccgccaccgagctgaagaaactggacttcaaggtgtcctctaccagcaacaacctgatcagcacaatcccctccgacaacctggctgccggcaccgacaacacatcttctctgggcccacctagcatgcccgtgcactacgatagccagctggataccacactgttcggcaagaagtctagccctctgacagagtctggcggccctctgtctctgagcgaggaaaacaacgacagcaagctgcctcctgtgctgaagcggcaccagcgggaaatcaccagaaccacactgcagagcgaccaagaggaaatcgattacgacgacaccatcagcgtcgagatgaagaaagaagatttcgacatctacgacgaggacgagaatcagagccccagatcctttcagaaaaagacccggcactacttcattgccgccgtcgagagactgtgggactacggcatgtctagcagccctcacgtgctgagaaatagagcccagagcggcagcgtgccccagttcaagaaagtggtgttccaagagttcaccgacggcagcttcacccagccactgtatagaggcgagctgaacgagcatctgggcctgctgggcccttatatcagagccgaagtggaagataacatcatggtcaccttccggaatcaggctagccggccttacagcttctacagctccctgatctcctacgaagaggaccagagacagggcgctgagccccggaagaatttcgtgaagcccaacgagactaagacctacttttggaaggtgcagcaccacatggcccctacaaaggacgagttcgactgcaaagcctgggcctacttctccgatgtggatctggaaaaggacgtgcacagcgggctcatcggaccactgcttgtgtgccacaccaacacactgaaccccgctcacggcagacaagtgacagtgcaagagttcgccctgttcttcaccatcttcgacgaaacaaagagctggtacttcaccgagaatatggaacggaactgcagggccccttgcaacatccagatggaagatcccaccttcaaagagaactaccggttccacgccatcaacggctacatcatggacacactgcccggcctggttatggcccaggatcagagaatccggtggtatctgctgtccatgggctccaacgagaatatccacagcatccacttcagcggccacgtgttcaccgtgcggaaaaaagaagagtacaaaatggccctgtacaatctgtaccctggggtgttcgaaaccgtggaaatgctgccttccaaggccggcatttggagagtggaatgtctgattggagagcacctccacgccggaatgagcaccctgtttctggtgtactccaacaagtgtcagacccctctcggcatggcctctggacacatcagagacttccagatcaccgcctctggccagtacggacagtgggctcctaaactggctcggctgcactactccggcagcatcaatgcctggtccaccaaagagcccttcagctggatcaaggtggacctgctggctcccatgatcatccacggaatcaagacccagggcgcaagacagaagttcagcagcctgtacatcagccagttcatcatcatgtacagcctggacggaaagaagtggcagacctaccggggcaatagcaccggcacactcatggtgttcttcggcaacgtggactccagcggcattaagcacaacatcttcaaccctccaatcattgcccggtacatccggctgcaccccacacactacagcatccggtctaccctgagaatggaactgatgggctgcgacctgaacagctgctctatgcccctcggaatggaaagcaaggccatcagcgacgcccagatcacagccagcagctacttcaccaacatgttcgccacttggagcccctccaaggctagactgcatctgcagggcagaagcaacgcttggaggccccaagtgaacaaccccaaagagtggctgcaggttgactttcaaaagaccatgaaagtgaccggcgtgaccacacagggcgtcaagtctctgctgacctctatgtacgtgaaagagttcctgattagcagcagccaggacggccaccagtggaccctgtttttccagaacggcaaagtgaaagtgttccagggcaatcaggacagcttcacacccgtggtcaattctctggaccctccactgctgaccagatacctgcggattcaccctcagtcttgggtgcaccagatcgctctgcggatggaagtgctgggctgtgaagctcaggacctctactagttaattaagagcatcttaccgccatttattcccatatttgttctgtttttcttgatttgggtatacatttaaatgttaataaaacaaaatggtggggcaatcatttacatttttagggatatgtaattactagttcaggtgtattgccacaagacaaacatgttaagaaactttcccgttatttacgctctgttcctgttaatcaacctctggattacaaaatttgtgaaagattgactgatattcttaactatgttgctccttttacgctgtgtggatatgctgctttatagcctctgtatctagctattgcttcccgtacggctttcgttttctcctccttgtataaatcctggttgctgtctcttttagaggagttgtggcccgttgtccgtcaacgtggcgtggtgtgctctgtgtttgctgacgcaacccccactggctggggcattgccaccacctgtcaactcctttctgggactttcgctttccccctcccgatcgccacggcagaactcatcgccgcctgccttgcccgctgctggacaggggctaggttgctgggcactgataattccgtggtgttgtctgtgccttctagttgccagccatctgttgtttgcccctcccccgtgccttccttgaccctggaaggtgccactcccactgtcctttcctaataaaatgaggaaattgcatcgcattgtctgagtaggtgtcattctattctggggggtggggtggggcaggacagcaagggggaggattgggaagacaatagcaggcatgctggggatgcggtgggctctatggctctagagcatggctacgtagataagtagcatggcgggttaatcattaactacacctgcaggaggaacccctagtgatggagttggccactccctctctgcgcgctcgctcgctcactgaggccgggcgaccaaaggtcgcccgacgcccgggcggcctcagtgagcgagcgagcgcgcagctgcctgcaggggcgcgcctcgaggcatgcggtaccaagcttgtcgagaagtactagaggatcataatcagccataccacatttgtagaggttttacttgctttaaaaaacctcccacacctccccctgaacctgaaacataaaatgaatgcaattgttgttgttaacttgtttattgcagcttataatggttacaaataaagcaatagcatcacaaatttcacaaataaagcatttttttcactgcattctagttgtggtttgtccaaactcatcaatgtatcttatcatgtctggatctgatcactgatatcgcctaggagatccgaaccagataagtgaaatctagttccaaactattttgtcatttttaattttcgtattagcttacgacgctacacccagttcccatctattttgtcactcttccctaaataatccttaaaaactccatttccacccctcccagttcccaactattttgtccgcccacagcggggcatttttcttcctgttatgtttttaatcaaacatcctgccaactccatgtgacaaaccgtcatcttcggctactttttctctgtcacagaatgaaaatttttctgtcatctcttcgttattaatgtttgtaattgactgaatatcaacgcttatttgcagcctgaatggcgaatgg

SEQ ID NO: 200 - DNA, 12165 bp, synthetic construct
  misc_feature 1..12165: note = Description of Artificial Sequence: Synthetic polynucleotide
  source 1..12165: mol_type = other DNA
aaagtagccgaagatgacggtttgtcacatggagttggcaggatgtttgattaaaaacataacaggaagaaaaatgccccgctgtgggcggacaaaatagttgggaactgggaggggtggaaatggagtttttaaggattatttagggaagagtgacaaaatagatgggaactgggtgtagcgtcgtaagctaatacgaaaattaaaaatgacaaaatagtttggaactagatttcacttatctggttcggatctcctaggcctgcaggcagctgcgcgctcgctcgctcactgaggccgcccgggcaaagcccgggcgtcgggcgacctttggtcgcccggcctcagtgagcgagcgagcgcgcagagagggagtggccaactccatcactaggggttccttgtagttaatgattaacccgccatgctacttatcgcggccgctcaatattggccattagccatattattcattggttatatagcataaatcaatattggctattggccattgcatacgttgtatctatatcataatatgtacatttatattggctcatgtccaatatgaccgccatgttggcattgattattgactagttattaatagtaatcaattacggggtcattagttcatagcccatatatggagttccgcgttacataacttacggtaaatggcccgcctggctgaccgcccaacgacccccgcccattgacgtcaataatgacgtatgttcccatagtaacgccaatagggactttccattgacgtcaatgggtggagtatttacggtaaactgcccacttggcagtacatcaagtgtatcatatgccaagtccgccccctattgacgtcaatgacggtaaatggcccgcctggcattatgcccagtacatgaccttacgggactttcctacttggcagtacatctacgtattagtcatcgctattaccatggtcgaggtgagccccacgttctgcttcactctccccatctcccccccctccccacccccaattttgtatttatttattttttaattattttgtgcagcgatgggggcggggggggggggggggcgcgcgccaggcggggcggggcggggcgaggggcggggcggggcgaggcggagaggtgcggcggcagccaatcagagcggcgcgctccgaaagtttccttttatggcgaggcggcggcggcggcggccctataaaaagcgaagcgcgcggcgggcgggagtcgctgcgacgctgccttcgccccgtgccccgctccgccgccgcctcgcgccgcccgccccggctctgactgaccgcgttactcccacaggtgagcgggcgggacggcccttctcctccgggctgtaattagcgcttggtttaatgacggcttgtttcttttctgtggctgcgtgaaagccttgaggggctccgggagggccctttgtgcgggggggagcggctcggggggtgcgtgcgtgtgtgtgtgcgtggggagcgccgcgtgcggcccgcgctgcccggcggctgtgagcgctgcgggcgcggcgcggggctttgtgcgctccgcagtgtgcgcgaggggagcgcggccgggggcggtgccccgcggtgcggggggggctgcgaggggaacaaaggctgcgtgcggggtgtgtgcgtgggggggtgagcagggggtgtgggcgcggcggtcgggctgtaacccccccctgcacccccctccccgagttgctgagcacggcccggcttcgggtgcggggctccgtacggggcgtggcgcggggctcgccgtgccgggcggggggtggcggcaggtgggggtgccgggcggggcggggccgcctcgggccggggagggctcgggggaggggcgcggcggcccccggagcgccggcggctgtcgaggcgcggcgagccgcagccattgccttttatggtaatcgtgcgagagggcgcagggacttcctttgtcccaaatctgtgcggagccgaaatctgggaggcgccgccgcaccccctctagcgggcgcggggcgaagcggtgcggcgccggcaggaaggaaatgggcggggagggccttcgtgcgtcgccgcgccgccgtccccttctccctctccagcctcggggctgtccgcggggggacggctgcctttcgggggggacggggcagggcggggttcggcttctggcgtgtgaccggcggctctagagcctctgctaaccatgttttagcctttcttctttttcctacagctcctgggcaacgtgctggttattgtgctgtctcatcatttgtcgacagaattcctcgaagatccgaaggggttcaagcttggcattccggtactgttggtaaagccagtttaaaccgcagccaccatgcagatcgagctgtctacctgcttcttcctgtgcctgctgcggttctgcttcagcgccaccagaagatattacctgggcgccgtggaactgagctgggactacatgcagtctgacctgggagagctgcccgtggacgctagatttcctccaagagtgcccaagagcttccccttcaacacctccgtggtgtacaagaaaaccctgttcgtggaattcaccgaccacctgttcaatatcgccaagcctcggcctccttggatgggactgctgggacctacaattcaggccgaggtgtacgacaccgtggtcatcaccctgaagaacatggccagccatcctgtgtctctgcacgccgtgggagtgtcttattggaaggcttctgagggcgccgagtacgacgatcagacaagccagagagagaaagaggacgacaaggttttccctggcggcagccacacctatgtctggcaggtcctgaaagaaaacggccctatggcctccgatcctctgtgcctgacatacagctacctgagccacgtggacctggtcaaggacctgaattctggcctgatcggagccctgctcgtgtgtagagaaggcagcctggccaaagagaaaacccagacactgcacaagttcatcctgctgttcgccgtgttcgacgagggcaagagctggcacagcgagacaaagaacagcctgatgcaggacagggatgccgcctctgctagagcttggcctaagatgcacaccgtgaacggctacgtgaacagaagcctgcctggactgatcggctgccacagaaagtccgtgtactggcacgtgatcggcatgggcacaacacctgaggtgcacagcatctttctggaaggccacaccttcctcgtgcggaaccacagacaggccagcctggaaatcagccctatcaccttcctgaccgctcagaccctgctgatggatctgggccagtttctgctgttctgccacatcagctcccaccagcacgatggcatggaagcctacgtgaaggtggacagctgccccgaagaaccccagctgcggatgaagaacaacgaggaagccgaggactacgacgacgacctgaccgactctgagatggacgtcgtcagattcgacgacgataacagccccagcttcatccagatcagaagcgtggccaagaagcaccccaagacctgggtgcactatatcgccgccgaggaagaggactgggattacgctcctctggtgctggcccctgacgacagaagctacaagagccagtacctgaacaacggccctcagcggatcggccggaagtataagaaagtgcggttcatggcctacaccgacgagacattcaagaccagagaggccatccagcacgagagcggaattctgggccctctgctgtatggcgaagtgggcgatacactgctgatcatcttcaagaaccaggccagcagaccctacaacatctaccctcacggcatcaccgatgtgcggcccctgtattctagaaggctgcccaagggcgtgaagcacctgaaggacttccctatcctgcctggcgagattttcaagtacaagtggaccgtgaccgtggaagatggccccaccaagagcgaccctagatgtctgacacggtactacagcagcttcgtgaacatggaacgcgacctggccagcggcctgattggacctctgctgatctgctacaaagaaagcgtggaccagcggggcaaccagatcatgagcgacaagcggaacgtgatcctgtttagcgtgttcgatgagaaccggtcctggtatctgaccgagaacatccagcggtttctgcccaatcctgccggggtgcaactggaagatcctgagttccaggcaagcaacatcatgcactccatcaatggctatgtgttcgacagcctgcagctgagcgtgtgcctgcacgaagtggcctactggtacatcctgagcattggcgcccagaccgacttcctgtccgtgttctttagcggctacaccttcaagcacaagatggtgtacgaggataccctgacactgttcccattcagcggcgagacagtgttcatgagcatggaaaaccccggcctgtggattctgggctgtcacaacagcgacttccggaacagaggcatgacagccctgctgaaggtgtccagctgcgacaagaacaccggcgactactacgaggacagctatgaggacatcagcgcctacctgctgagcaagaacaatgccatcgagcctcggagcttcagccagaatcctcctgtgctgaagcggcaccagcgcgagatcaccagaacaaccctgcagagcgaccaagaggaaatcgattacgacgacaccatcagcgtcgagatgaagaaagaagatttcgacatctacgacgaggacgagaatcagagccccagaagctttcagaaaaagacccggcactacttcattgccgccgtcgagagactgtgggactacggcatgtctagcagccctcacgtgctgagaaatagagcccagagcggcagcgtgccccagttcaagaaagtggtgttccaagagttcaccgacggcagcttcacccagccactgtatagaggcgagctgaacgagcatctgggcctgctgggcccttatatcagagccgaagtggaagataacatcatggtcaccttccggaatcaggctagccggccttacagcttctacagctccctgatcagctacgaagaggaccagagacagggcgctgagcccagaaagaacttcgtgaagcccaacgagactaagacctacttttggaaggtgcagcaccacatggcccctacaaaggacgagttcgactgcaaagcctgggcctacttctccgatgtggatctggaaaaggacgtgcacagcgggctcatcggaccactgcttgtgtgccacaccaacacactgaaccccgctcacggcagacaagtgacagtgcaagagttcgccctgttcttcaccatcttcgacgaaacaaagagctggtacttcaccgagaatatggaacggaactgcagagccccttgcaacatccagatggaagatcccaccttcaaagagaactaccggttccacgccatcaacggctacatcatggacacactgcccggcctggttatggcccaggatcagagaatccggtggtatctgctgtccatgggctccaacgagaatatccacagcatccacttcagcggccacgtgttcaccgtgcggaaaaaagaagagtacaaaatggccctgtacaatctgtaccctggggtgttcgaaaccgtggaaatgctgccttccaaggccggcatttggagagtggaatgtctgattggagagcacctccacgccggaatgagcaccctgtttctggtgtacagcaacaagtgtcagacccctctcggcatggcctctggacacatcagagacttccagatcaccgcctctggccagtacggacagtgggctcctaaactggctcggctgcactacagcggcagcatcaatgcctggtccaccaaagagcccttcagctggatcaaggtggacctgctggctcccatgatcatccacggaatcaagacccagggcgccagacagaagttcagcagcctgtacatcagccagttcatcatcatgtacagcctggacggcaagaagtggcagacctacagaggcaacagcaccggcacactcatggtgttcttcggcaacgtggactccagcggcattaagcacaacatcttcaaccctccaatcattgcccggtacatccggctgcaccccacacactacagcatccggtctaccctgagaatggaactgatgggctgcgacctgaacagctgctctatgcccctcggaatggaaagcaaggccatcagcgacgcccagatcacagccagcagctacttcaccaacatgttcgccacttggagcccctccaaggctagactgcatctgcagggcagaagcaacgcttggaggccccaagtgaacaaccccaaagagtggctgcaggttgactttcaaaagaccatgaaagtgaccggcgtgaccacacagggcgtcaagtctctgctgacctctatgtacgtgaaagagttcctgatctccagcagccaggacggccatcagtggaccctgtttttccagaacggcaaagtgaaagtgttccagggcaatcaggacagcttcacacccgtggtcaattctctggaccctccactgctgaccagatacctgcggattcaccctcagtcttgggtgcaccagatcgctctgcggatggaagtgctgggctgtgaagctcaggacctctactagttaattaagagcatcttaccgccatttattcccatatttgttctgtttttcttgatttgggtatacatttaaatgttaataaaacaaaatggtggggcaatcatttacatttttagggatatgtaattactagttcaggtgtattgccacaagacaaacatgttaagaaactttcccgttatttacgctctgttcctgttaatcaacctctggattacaaaatttgtgaaagattgactgatattcttaactatgttgctccttttacgctgtgtggatatgctgctttatagcctctgtatctagctattgcttcccgtacggctttcgttttctcctccttgtataaatcctggttgctgtctcttttagaggagttgtggcccgttgtccgtcaacgtggcgtggtgtgctctgtgtttgctgacgcaacccccactggctggggcattgccaccacctgtcaactcctttctgggactttcgctttccccctcccgatcgccacggcagaactcatcgccgcctgccttgcccgctgctggacaggggctaggttgctgggcactgataattccgtggtgttgtcatcgattccataaagtaggaaacactacacgattccataaagtaggaaacactacatcactccataaagtaggaaacactacagttaactgtgccttctagttgccagccatctgttgtttgcccctcccccgtgccttccttgaccctggaaggtgccactcccactgtcctttcctaataaaatgaggaaattgcatcgcattgtctgagtaggtgtcattctattctggggggtggggtggggcaggacagcaagggggaggattgggaagacaatagcaggcatgctggggatgcggtgggctctatggcggcgcgccgcatggctacgtagataagtagcatggcgggttaatcattaactacacctgcaggaggaacccctagtgatggagttggccactccctctctgcgcgctcgctcgctcactgaggccgggcgaccaaaggtcgcccgacgcccgggcggcctcagtgagcgagcgagcgcgcagctgcctgcaggtcgacgctagcagctgatgcatagcatgcggtaccgggagatgggggaggctaactgaaacacggaaggagacaataccggaaggaacccgcgctatgacggcaataaaaagacagaataaaacgcacgggtgttgggtcgtttgttcataaacgcggggttcggtcccagggctggcactctgtcgataccccaccgagaccccattgggaccaatacgcccgcgtttcttccttttccccaccccaacccccaagttcgggtgaaggcccagggctcgcagccaacgtcggggcggcaagccctgccatagccactacgggtacgtaggccaaccactagaactatagctagagtcctgggcgaacaaacgatgctcgccttccagaaaaccgaggatgcgaaccacttcatccggggtcagcaccaccggcaagcgccgcgacggccgaggtctaccgatctcctgaagccagggcagatccgtgcacagcaccttgccgtagaagaacagcaaggccgccaatgcctgacgatgcgtggagaccgaaaccttgcgctcgttcgccagccaggacagaaatgcctcgacttcgctgctgcccaaggttgccgggtgacgcacaccgtggaaacggatgaaggcacgaacccagttgacataagcctgttcggttcgtaaactgtaatgcaagtagcgtatgcgctcacgcaactggtccagaaccttgaccgaacgcagcggtggtaacggcgcagtggcggttttcatggcttgttatgactgtttttttgtacagtctatgcctcgggcatccaagcagcaagcgcgttacgccgtgggtcgatgtttgatgttatggagcagcaacgatgttacgcagcagcaacgatgttacgcagcagggcagtcgccctaaaacaaagttaggtggctcaagtatgggcatcattcgcacatgtaggctcggccctgaccaagtcaaatccatgcgggctgctcttgatcttttcggtcgtgagttcggagacgtagccacctactcccaacatcagccggactccgattacctcgggaacttgctccgtagtaagacattcatcgcgcttgctgccttcgaccaagaagcggttgttggcgctctcgcggcttacgttctgcccaggtttgagcagccgcgtagtgagatctatatctatgatctcgcagtctccggcgagcaccggaggcagggcattgccaccgcgctcatcaatctcctcaagcatgaggccaacgcgcttggtgcttatgtgatctacgtgcaagcagattacggtgacgatcccgcagtggctctctatacaaagttgggcatacgggaagaagtgatgcactttgatatcgacccaagtaccgccacctaacaattcgttcaagccgagatcggcttcccggccgcggagttgttcggtaaattgtcacaacgccgcgaatatagtctttaccatgcccttggccacgcccctctttaatacgacgggcaatttgcacttcagaaaatgaagagtttgctttagccataacaaaagtccagtatgctttttcacagcataactggactgatttcagtttacaactattctgtctagtttaagactttattgtcatagtttagatctattttgttcagtttaagactttattgtccgcccacacccgcttacgcagggcatccatttattactcaaccgtaaccgattttgccaggttacgcggctggtctgcggtgtgaaataccgcacagatgcgtaaggagaaaataccgcatcaggcgctcttccgcttcctcgctcactgactcgctgcgctcggtcgttcggctgcggcgagcggtatcagctcactcaaaggcggtaatacggttatccacagaatcaggggataacgcaggaaagaacatgtgagcaaaaggccagcaaaaggccaggaaccgtaaaaaggccgcgttgctggcgtttttccataggctccgcccccctgacgagcatcacaaaaatcgacgctcaagtcagaggtggcgaaacccgacaggactataaagataccaggcgtttccccctggaagctccctcgtgcgctctcctgttccgaccctgccgcttaccggatacctgtccgcctttctcccttcgggaagcgtggcgctttctcaatgctcacgctgtaggtatctcagttcggtgtaggtcgttcgctccaagctgggctgtgtgcacgaaccccccgttcagcccgaccgctgcgccttatccggtaactatcgtcttgagtccaacccggtaagacacgacttatcgccactggcagcagccactggtaacaggattagcagagcgaggtatgtaggcggtgctacagagttcttgaagtggtggcctaactacggctacactagaaggacagtatttggtatctgcgctctgctgaagccagttaccttcggaaaaagagttggtagctcttgatccggcaaacaaaccaccgctggtagcggtggtttttttgtttgcaagcagcagattacgcgcagaaaaaaaggatctcaagaagatcctttgatcttttctacggggtctgacgctcagtggaacgaaaactcacgttaagggattttggtcatgagattatcaaaaaggatcttcacctagatccttttaaattaaaaatgaagttttaaatcaatctaaagtatatatgagtaaacttggtctgacagttaccaatgcttaatcagtgaggcacctatctcagcgatctgtctatttcgttcatccatagttgcctgactccccgtcgtgtagataactacgatacgggagggcttaccatctggccccagtgctgcaatgataccgcgagacccacgctcaccggctccagatttatcagcaataaaccagccagccggaagggccgagcgcagaagtggtcctgcaactttatccgcctccatccagtctattaattgttgccgggaagctagagtaagtagttcgccagttaatagtttgcgcaacgttgttgccattgctacaggcatcgtggtgtcacgctcgtcgtttggtatggcttcattcagctccggttcccaacgatcaaggcgagttacatgatcccccatgttgtgcaaaaaagcggttagctccttcggtcctccgatcgttgtcagaagtaagttggccgcagtgttatcactcatggttatggcagcactgcataattctcttactgtcatgccatccgtaagatgcttttctgtgactggtgagtactcaaccaagtcattctgagaatagtgtatgcggcgaccgagttgctcttgcccggcgtcaatacgggataataccgcgccacatagcagaactttaaaagtgctcatcattggaaaacgttcttcggggcgaaaactctcaaggatcttaccgctgttgagatccagttcgatgtaacccactcgtgcacccaactgatcttcagcatcttttactttcaccagcgtttctgggtgagcaaaaacaggaaggcaaaatgccgcaaaaaagggaataagggcgacacggaaatgttgaatactcatactcttcctttttcaatattattgaagcatttatcagggttattgtctcatgagcggatacatatttgaatgtatttagaaaaataaacaaataggggttccgcgcacatttccccgaaaagtgccacctgaaattgtaaacgttaatattttgttaaaattcgcgttaaatttttgttaaatcagctcattttttaaccaataggccgaaatcggcaaaatcccttataaatcaaaagaatagaccgagatagggttgagtgttgttccagtttggaacaagagtccactattaaagaacgtggactccaacgtcaaagggcgaaaaaccgtctatcagggcgatggcccactacgtgaaccatcaccctaatcaagttttttggggtcgaggtgccgtaaagcactaaatcggaaccctaaagggagcccccgatttagagcttgacggggaaagccggcgaacgtggcgagaaaggaagggaagaaagcgaaaggagcgggcgctagggcgctggcaagtgtagcggtcacgctgcgcgtaaccaccacacccgccgcgcttaatgcgccgctacagggcgcgtcccattcgccattcaggctgcaaataagcgttgatattcagtcaattacaaacattaataacgaagagatgacagaaaaattttcattctgtgacagagaa

SEQ ID NO: 201 - DNA, 11512 bp, synthetic construct
  misc_feature 1..11512: note = Description of Artificial Sequence: Synthetic polynucleotide
  source 1..11512: mol_type = other DNA
aaagtagccgaagatgacggtttgtcacatggagttggcaggatgtttgattaaaaacataacaggaagaaaaatgccccgctgtgggcggacaaaatagttgggaactgggaggggtggaaatggagtttttaaggattatttagggaagagtgacaaaatagatgggaactgggtgtagcgtcgtaagctaatacgaaaattaaaaatgacaaaatagtttggaactagatttcacttatctggttcggatctcctaggcctgcaggcagctgcgcgctcgctcgctcactgaggccgcccgggcaaagcccgggcgtcgggcgacctttggtcgcccggcctcagtgagcgagcgagcgcgcagagagggagtggccaactccatcactaggggttccttgtagttaatgattaacccgccatgctacttatcgcggccgcaggctcagaggcacacaggagtttctgggctcaccctgcccccttccaacccctcagttcccatcctccagcagctgtttgtgtgctgcctctgaagtccacactgaacaaacttcagcctactcatgtccctaaaatgggcaaacattgcaagcagcaaacagcaaacacacagccctccctgcctgctgaccttggagctggggcagaggtcagagacctctctgggcccatgccacctccaacatccactcgaccccttggaatttcggtggagaggagcagaggttgtcctggcgtggtttaggtagtgtgagagggtccgggttcaaaaccacttgctgggtggggagtcgtcagtaagtggctatgccccgaccccgaagcctgtttccccatctgtacaatggaaatgataaagacgcccatctgatagggtttttgtggcaaataaacatttggtttttttgttttgttttgttttgttttttgagatggaggtttgctctgtcgcccaggctggagtgcagtgacacaatctcatctcaccacaaccttcccctgcctcagcctcccaagtagctgggattacaagcatgtgccaccacacctggctaattttctatttttagtagagacgggtttctccatgttggtcagcctcagcctcccaagtaactgggattacaggcctgtgccaccacacccggctaattttttctatttttgacagggacggggtttcaccatgttggtcaggctggtctagaggtaccggatcttgctaccagtggaacagccactaaggattctgcagtgagagcagagggccagctaagtggtactctcccagagactgtctgactcacgccaccccctccaccttggacacaggacgctgtggtttctgagccaggtacaatgactcctttcggtaagtgcagtggaagctgtacactgcccaggcaaagcgtccgggcagcgtaggcgggcgactcagatcccagccagtggacttagcccctgtttgctcctccgataactggggtgaccttggttaatattcaccagcagcctcccccgttgcccctctggatccactgcttaaatacggacgaggacagggccctgtctcctcagcttcaggcaccaccactgacctgggacagtgaatccggactctaaggtaaatataaaatttttaagtgtataatgtgttaaactactgattctaattgtttctctcttttagattccaacctttggaactgagtttaaaccgcagccaccatgcagatcgagctgtctacctgcttcttcctgtgcctgctgcggttctgcttcagcgccaccagaagatattacctgggcgccgtggaactgagctgggactacatgcagtctgacctgggagagctgcccgtggacgctagatttcctccaagagtgcccaagagcttccccttcaacacctccgtggtgtacaagaaaaccctgttcgtggaattcaccgaccacctgttcaatatcgccaagcctcggcctccttggatgggactgctgggacctacaattcaggccgaggtgtacgacaccgtggtcatcaccctgaagaacatggccagccatcctgtgtctctgcacgccgtgggagtgtcttattggaaggcttctgagggcgccgagtacgacgatcagacaagccagagagagaaagaggacgacaaggttttccctggcggcagccacacctatgtctggcaggtcctgaaagaaaacggccctatggcctccgatcctctgtgcctgacatacagctacctgagccacgtggacctggtcaaggacctgaattctggcctgatcggagccctgctcgtgtgtagagaaggcagcctggccaaagagaaaacccagacactgcacaagttcatcctgctgttcgccgtgttcgacgagggcaagagctggcacagcgagacaaagaacagcctgatgcaggacagggatgccgcctctgctagagcttggcctaagatgcacaccgtgaacggctacgtgaacagaagcctgcctggactgatcggctgccacagaaagtccgtgtactggcacgtgatcggcatgggcacaacacctgaggtgcacagcatctttctggaaggccacaccttcctcgtgcggaaccacagacaggccagcctggaaatcagccctatcaccttcctgaccgctcagaccctgctgatggatctgggccagtttctgctgttctgccacatcagctcccaccagcacgatggcatggaagcctacgtgaaggtggacagctgccccgaagaaccccagctgcggatgaagaacaacgaggaagccgaggactacgacgacgacctgaccgactctgagatggacgtcgtcagattcgacgacgataacagccccagcttcatccagatcagaagcgtggccaagaagcaccccaagacctgggtgcactatatcgccgccgaggaagaggactgggattacgctcctctggtgctggcccctgacgacagaagctacaagagccagtacctgaacaacggccctcagcggatcggccggaagtataagaaagtgcggttcatggcctacaccgacgagacattcaagaccagagaggccatccagcacgagagcggaattctgggccctctgctgtatggcgaagtgggcgatacactgctgatcatcttcaagaaccaggccagcagaccctacaacatctaccctcacggcatcaccgatgtgcggcccctgtattctagaaggctgcccaagggcgtgaagcacctgaaggacttccctatcctgcctggcgagattttcaagtacaagtggaccgtgaccgtggaagatggccccaccaagagcgaccctagatgtctgacacggtactacagcagcttcgtgaacatggaacgcgacctggccagcggcctgattggacctctgctgatctgctacaaagaaagcgtggaccagcggggcaaccagatcatgagcgacaagcggaacgtgatcctgtttagcgtgttcgatgagaaccggtcctggtatctgaccgagaacatccagcggtttctgcccaatcctgccggggtgcaactggaagatcctgagttccaggcaagcaacatcatgcactccatcaatggctatgtgttcgacagcctgcagctgagcgtgtgcctgcacgaagtggcctactggtacatcctgagcattggcgcccagaccgacttcctgtccgtgttctttagcggctacaccttcaagcacaagatggtgtacgaggataccctgacactgttcccattcagcggcgagacagtgttcatgagcatggaaaaccccggcctgtggattctgggctgtcacaacagcgacttccggaacagaggcatgacagccctgctgaaggtgtccagctgcgacaagaacaccggcgactactacgaggacagctatgaggacatcagcgcctacctgctgagcaagaacaatgccatcgagcctcggagcttcagccagaatcctcctgtgctgaagcggcaccagcgcgagatcaccagaacaaccctgcagagcgaccaagaggaaatcgattacgacgacaccatcagcgtcgagatgaagaaagaagatttcgacatctacgacgaggacgagaatcagagccccagaagctttcagaaaaagacccggcactacttcattgccgccgtcgagagactgtgggactacggcatgtctagcagccctcacgtgctgagaaatagagcccagagcggcagcgtgccccagttcaagaaagtggtgttccaagagttcaccgacggcagcttcacccagccactgtatagaggcgagctgaacgagcatctgggcctgctgggcccttatatcagagccgaagtggaagataacatcatggtcaccttccggaatcaggctagccggccttacagcttctacagctccctgatcagctacgaagaggaccagagacagggcgctgagcccagaaagaacttcgtgaagcccaacgagactaagacctacttttggaaggtgcagcaccacatggcccctacaaaggacgagttcgactgcaaagcctgggcctacttctccgatgtggatctggaaaaggacgtgcacagcgggctcatcggaccactgcttgtgtgccacaccaacacactgaaccccgctcacggcagacaagtgacagtgcaagagttcgccctgttcttcaccatcttcgacgaaacaaagagctggtacttcaccgagaatatggaacggaactgcagagccccttgcaacatccagatggaagatcccaccttcaaagagaactaccggttccacgccatcaacggctacatcatggacacactgcccggcctggttatggcccaggatcagagaatccggtggtatctgctgtccatgggctccaacgagaatatccacagcatccacttcagcggccacgtgttcaccgtgcggaaaaaagaagagtacaaaatggccctgtacaatctgtaccctggggtgttcgaaaccgtggaaatgctgccttccaaggccggcatttggagagtggaatgtctgattggagagcacctccacgccggaatgagcaccctgtttctggtgtacagcaacaagtgtcagacccctctcggcatggcctctggacacatcagagacttccagatcaccgcctctggccagtacggacagtgggctcctaaactggctcggctgcactacagcggcagcatcaatgcctggtccaccaaagagcccttcagctggatcaaggtggacctgctggctcccatgatcatccacggaatcaagacccagggcgccagacagaagttcagcagcctgtacatcagccagttcatcatcatgtacagcctggacggcaagaagtggcagacctacagaggcaacagcaccggcacactcatggtgttcttcggcaacgtggactccagcggcattaagcacaacatcttcaaccctccaatcattgcccggtacatccggctgcaccccacacactacagcatccggtctaccctgagaatggaactgatgggctgcgacctgaacagctgctctatgcccctcggaatggaaagcaaggccatcagcgacgcccagatcacagccagcagctacttcaccaacatgttcgccacttggagcccctccaaggctagactgcatctgcagggcagaagcaacgcttggaggccccaagtgaacaaccccaaagagtggctgcaggttgactttcaaaagaccatgaaagtgaccggcgtgaccacacagggcgtcaagtctctgctgacctctatgtacgtgaaagagttcctgatctccagcagccaggacggccatcagtggaccctgtttttccagaacggcaaagtgaaagtgttccagggcaatcaggacagcttcacacccgtggtcaattctctggaccctccactgctgaccagatacctgcggattcaccctcagtcttgggtgcaccagatcgctctgcggatggaagtgctgggctgtgaagctcaggacctctactagttaattaagagcatcttaccgccatttattcccatatttgttctgtttttcttgatttgggtatacatttaaatgttaataaaacaaaatggtggggcaatcatttacatttttagggatatgtaattactagttcaggtgtattgccacaagacaaacatgttaagaaactttcccgttatttacgctctgttcctgttaatcaacctctggattacaaaatttgtgaaagattgactgatattcttaactatgttgctccttttacgctgtgtggatatgctgctttatagcctctgtatctagctattgcttcccgtacggctttcgttttctcctccttgtataaatcctggttgctgtctcttttagaggagttgtggcccgttgtccgtcaacgtggcgtggtgtgctctgtgtttgctgacgcaacccccactggctggggcattgccaccacctgtcaactcctttctgggactttcgctttccccctcccgatcgccacggcagaactcatcgccgcctgccttgcccgctgctggacaggggctaggttgctgggcactgataattccgtggtgttgtcatcgattccataaagtaggaaacactacacgattccataaagtaggaaacactacatcactccataaagtaggaaacactacagttaactgtgccttctagttgccagccatctgttgtttgcccctcccccgtgccttccttgaccctggaaggtgccactcccactgtcctttcctaataaaatgaggaaattgcatcgcattgtctgagtaggtgtcattctattctggggggtggggtggggcaggacagcaagggggaggattgggaagacaatagcaggcatgctggggatgcggtgggctctatggcggcgcgccgcatggctacgtagataagtagcatggcgggttaatcattaactacacctgcaggaggaacccctagtgatggagttggccactccctctctgcgcgctcgctcgctcactgaggccgggcgaccaaaggtcgcccgacgcccgggcggcctcagtgagcgagcgagcgcgcagctgcctgcaggtcgacgctagcagctgatgcatagcatgcggtaccgggagatgggggaggctaactgaaacacggaaggagacaataccggaaggaacccgcgctatgacggcaataaaaagacagaataaaacgcacgggtgttgggtcgtttgttcataaacgcggggttcggtcccagggctggcactctgtcgataccccaccgagaccccattgggaccaatacgcccgcgtttcttccttttccccaccccaacccccaagttcgggtgaaggcccagggctcgcagccaacgtcggggcggcaagccctgccatagccactacgggtacgtaggccaaccactagaactatagctagagtcctgggcgaacaaacgatgctcgccttccagaaaaccgaggatgcgaaccacttcatccggggtcagcaccaccggcaagcgccgcgacggccgaggtctaccgatctcctgaagccagggcagatccgtgcacagcaccttgccgtagaagaacagcaaggccgccaatgcctgacgatgcgtggagaccgaaaccttgcgctcgttcgccagccaggacagaaatgcctcgacttcgctgctgcccaaggttgccgggtgacgcacaccgtggaaacggatgaaggcacgaacccagttgacataagcctgttcggttcgtaaactgtaatgcaagtagcgtatgcgctcacgcaactggtccagaaccttgaccgaacgcagcggtggtaacggcgcagtggcggttttcatggcttgttatgactgtttttttgtacagtctatgcctcgggcatccaagcagcaagcgcgttacgccgtgggtcgatgtttgatgttatggagcagcaacgatgttacgcagcagcaacgatgttacgcagcagggcagtcgccctaaaacaaagttaggtggctcaagtatgggcatcattcgcacatgtaggctcggccctgaccaagtcaaatccatgcgggctgctcttgatcttttcggtcgtgagttcggagacgtagccacctactcccaacatcagccggactccgattacctcgggaacttgctccgtagtaagacattcatcgcgcttgctgccttcgaccaagaagcggttgttggcgctctcgcggcttacgttctgcccaggtttgagcagccgcgtagtgagatctatatctatgatctcgcagtctccggcgagcaccggaggcagggcattgccaccgcgctcatcaatctcctcaagcatgaggccaacgcgcttggtgcttatgtgatctacgtgcaagcagattacggtgacgatcccgcagtggctctctatacaaagttgggcatacgggaagaagtgatgcactttgatatcgacccaagtaccgccacctaacaattcgttcaagccgagatcggcttcccggccgcggagttgttcggtaaattgtcacaacgccgcgaatatagtctttaccatgcccttggccacgcccctctttaatacgacgggcaatttgcacttcagaaaatgaagagtttgctttagccataacaaaagtccagtatgctttttcacagcataactggactgatttcagtttacaactattctgtctagtttaagactttattgtcatagtttagatctattttgttcagtttaagactttattgtccgcccacacccgcttacgcagggcatccatttattactcaaccgtaaccgattttgccaggttacgcggctggtctgcggtgtgaaataccgcacagatgcgtaaggagaaaataccgcatcaggcgctcttccgcttcctcgctcactgactcgctgcgctcggtcgttcggctgcggcgagcggtatcagctcactcaaaggcggtaatacggttatccacagaatcaggggataacgcaggaaagaacatgtgagcaaaaggccagcaaaaggccaggaaccgtaaaaaggccgcgttgctggcgtttttccataggctccgcccccctgacgagcatcacaaaaatcgacgctcaagtcagaggtggcgaaacccgacaggactataaagataccaggcgtttccccctggaagctccctcgtgcgctctcctgttccgaccctgccgcttaccggatacctgtccgcctttctcccttcgggaagcgtggcgctttctcaatgctcacgctgtaggtatctcagttcggtgtaggtcgttcgctccaagctgggctgtgtgcacgaaccccccgttcagcccgaccgctgcgccttatccggtaactatcgtcttgagtccaacccggtaagacacgacttatcgccactggcagcagccactggtaacaggattagcagagcgaggtatgtaggcggtgctacagagttcttgaagtggtggcctaactacggctacactagaaggacagtatttggtatctgcgctctgctgaagccagttaccttcggaaaaagagttggtagctcttgatccggcaaacaaaccaccgctggtagcggtggtttttttgtttgcaagcagcagattacgcgcagaaaaaaaggatctcaagaagatcctttgatcttttctacggggtctgacgctcagtggaacgaaaactcacgttaagggattttggtcatgagattatcaaaaaggatcttcacctagatccttttaaattaaaaatgaagttttaaatcaatctaaagtatatatgagtaaacttggtctgacagttaccaatgcttaatcagtgaggcacctatctcagcgatctgtctatttcgttcatccatagttgcctgactccccgtcgtgtagataactacgatacgggagggcttaccatctggccccagtgctgcaatgataccgcgagacccacgctcaccggctccagatttatcagcaataaaccagccagccggaagggccgagcgcagaagtggtcctgcaactttatccgcctccatccagtctattaattgttgccgggaagctagagtaagtagttcgccagttaatagtttgcgcaacgttgttgccattgctacaggcatcgtggtgtcacgctcgtcgtttggtatggcttcattcagctccggttcccaacgatcaaggcgagttacatgatcccccatgttgtgcaaaaaagcggttagctccttcggtcctccgatcgttgtcagaagtaagttggccgcagtgttatcactcatggttatggcagcactgcataattctcttactgtcatgccatccgtaagatgcttttctgtgactggtgagtactcaaccaagtcattctgagaatagtgtatgcggcgaccgagttgctcttgcccggcgtcaatacgggataataccgcgccacatagcagaactttaaaagtgctcatcattggaaaacgttcttcggggcgaaaactctcaaggatcttaccgctgttgagatccagttcgatgtaacccactcgtgcacccaactgatcttcagcatcttttactttcaccagcgtttctgggtgagcaaaaacaggaaggcaaaatgccgcaaaaaagggaataagggcgacacggaaatgttgaatactcatactcttcctttttcaatattattgaagcatttatcagggttattgtctcatgagcggatacatatttgaatgtatttagaaaaataaacaaataggggttccgcgcacatttccccgaaaagtgccacctgaaattgtaaacgttaatattttgttaaaattcgcgttaaatttttgttaaatcagctcattttttaaccaataggccgaaatcggcaaaatcccttataaatcaaaagaatagaccgagatagggttgagtgttgttccagtttggaacaagagtccactattaaagaacgtggactccaacgtcaaagggcgaaaaaccgtctatcagggcgatggcccactacgtgaaccatcaccctaatcaagttttttggggtcgaggtgccgtaaagcactaaatcggaaccctaaagggagcccccgatttagagcttgacggggaaagccggcgaacgtggcgagaaaggaagggaagaaagcgaaaggagcgggcgctagggcgctggcaagtgtagcggtcacgctgcgcgtaaccaccacacccgccgcgcttaatgcgccgctacagggcgcgtcccattcgccattcaggctgcaaataagcgttgatattcagtcaattacaaacattaataacgaagagatgacagaaaaattttcattctgtgacagagaa

SEQ ID NO: 202 - DNA, 10563 bp, synthetic construct
  misc_feature 1..10563: note = Description of Artificial Sequence: Synthetic polynucleotide
  source 1..10563: mol_type = other DNA
aaagtagccgaagatgacggtttgtcacatggagttggcaggatgtttgattaaaaacataacaggaagaaaaatgccccgctgtgggcggacaaaatagttgggaactgggaggggtggaaatggagtttttaaggattatttagggaagagtgacaaaatagatgggaactgggtgtagcgtcgtaagctaatacgaaaattaaaaatgacaaaatagtttggaactagatttcacttatctggttcggatctcctaggcctgcaggcagctgcgcgctcgctcgctcactgaggccgcccgggcaaagcccgggcgtcgggcgacctttggtcgcccggcctcagtgagcgagcgagcgcgcagagagggagtggccaactccatcactaggggttccttgtagttaatgattaacccgccatgctacttatcgcggccgccgggggaggctgctggtgaatattaaccaaggtcaccccagttatcggaggagcaaacaggggctaagtccacacgcgtggtaccgtctgtctgcacatttcgtagagcgagtgttccgatactctaatctccctaggcaaggttcatatttgtgtaggttacttattctccttttgttgactaagtcaataatcagaatcagcaggtttggagtcagcttggcagggatcagcagcctgggttggaaggagggggtataaaagccccttcaccaggagaagccgtcacacagatccacaagctcctgaagaggtaagggtttaagggatggttggttggtggggtattaatgtttaattacctggagcacctgcctgaaatcactttttttcaggttggtttaaaccgcagccaccatgcagatcgagctgtctacctgcttcttcctgtgcctgctgcggttctgcttcagcgccaccagaagatattacctgggcgccgtggaactgagctgggactacatgcagtctgacctgggagagctgcccgtggacgctagatttcctccaagagtgcccaagagcttccccttcaacacctccgtggtgtacaagaaaaccctgttcgtggaattcaccgaccacctgttcaatatcgccaagcctcggcctccttggatgggactgctgggacctacaattcaggccgaggtgtacgacaccgtggtcatcaccctgaagaacatggccagccatcctgtgtctctgcacgccgtgggagtgtcttattggaaggcttctgagggcgccgagtacgacgatcagacaagccagagagagaaagaggacgacaaggttttccctggcggcagccacacctatgtctggcaggtcctgaaagaaaacggccctatggcctccgatcctctgtgcctgacatacagctacctgagccacgtggacctggtcaaggacctgaattctggcctgatcggagccctgctcgtgtgtagagaaggcagcctggccaaagagaaaacccagacactgcacaagttcatcctgctgttcgccgtgttcgacgagggcaagagctggcacagcgagacaaagaacagcctgatgcaggacagggatgccgcctctgctagagcttggcctaagatgcacaccgtgaacggctacgtgaacagaagcctgcctggactgatcggctgccacagaaagtccgtgtactggcacgtgatcggcatgggcacaacacctgaggtgcacagcatctttctggaaggccacaccttcctcgtgcggaaccacagacaggccagcctggaaatcagccctatcaccttcctgaccgctcagaccctgctgatggatctgggccagtttctgctgttctgccacatcagctcccaccagcacgatggcatggaagcctacgtgaaggtggacagctgccccgaagaaccccagctgcggatgaagaacaacgaggaagccgaggactacgacgacgacctgaccgactctgagatggacgtcgtcagattcgacgacgataacagccccagcttcatccagatcagaagcgtggccaagaagcaccccaagacctgggtgcactatatcgccgccgaggaagaggactgggattacgctcctctggtgctggcccctgacgacagaagctacaagagccagtacctgaacaacggccctcagcggatcggccggaagtataagaaagtgcggttcatggcctacaccgacgagacattcaagaccagagaggccatccagcacgagagcggaattctgggccctctgctgtatggcgaagtgggcgatacactgctgatcatcttcaagaaccaggccagcagaccctacaacatctaccctcacggcatcaccgatgtgcggcccctgtattctagaaggctgcccaagggcgtgaagcacctgaaggacttccctatcctgcctggcgagattttcaagtacaagtggaccgtgaccgtggaagatggccccaccaagagcgaccctagatgtctgacacggtactacagcagcttcgtgaacatggaacgcgacctggccagcggcctgattggacctctgctgatctgctacaaagaaagcgtggaccagcggggcaaccagatcatgagcgacaagcggaacgtgatcctgtttagcgtgttcgatgagaaccggtcctggtatctgaccgagaacatccagcggtttctgcccaatcctgccggggtgcaactggaagatcctgagttccaggcaagcaacatcatgcactccatcaatggctatgtgttcgacagcctgcagctgagcgtgtgcctgcacgaagtggcctactggtacatcctgagcattggcgcccagaccgacttcctgtccgtgttctttagcggctacaccttcaagcacaagatggtgtacgaggataccctgacactgttcccattcagcggcgagacagtgttcatgagcatggaaaaccccggcctgtggattctgggctgtcacaacagcgacttccggaacagaggcatgacagccctgctgaaggtgtccagctgcgacaagaacaccggcgactactacgaggacagctatgaggacatcagcgcctacctgctgagcaagaacaatgccatcgagcctcggagcttcagccagaatcctcctgtgctgaagcggcaccagcgcgagatcaccagaacaaccctgcagagcgaccaagaggaaatcgattacgacgacaccatcagcgtcgagatgaagaaagaagatttcgacatctacgacgaggacgagaatcagagccccagaagctttcagaaaaagacccggcactacttcattgccgccgtcgagagactgtgggactacggcatgtctagcagccctcacgtgctgagaaatagagcccagagcggcagcgtgccccagttcaagaaagtggtgttccaagagttcaccgacggcagcttcacccagccactgtatagaggcgagctgaacgagcatctgggcctgctgggcccttatatcagagccgaagtggaagataacatcatggtcaccttccggaatcaggctagccggccttacagcttctacagctccctgatcagctacgaagaggaccagagacagggcgctgagcccagaaagaacttcgtgaagcccaacgagactaagacctacttttggaaggtgcagcaccacatggcccctacaaaggacgagttcgactgcaaagcctgggcctacttctccgatgtggatctggaaaaggacgtgcacagcgggctcatcggaccactgcttgtgtgccacaccaacacactgaaccccgctcacggcagacaagtgacagtgcaagagttcgccctgttcttcaccatcttcgacgaaacaaagagctggtacttcaccgagaatatggaacggaactgcagagccccttgcaacatccagatggaagatcccaccttcaaagagaactaccggttccacgccatcaacggctacatcatggacacactgcccggcctggttatggcccaggatcagagaatccggtggtatctgctgtccatgggctccaacgagaatatccacagcatccacttcagcggccacgtgttcaccgtgcggaaaaaagaagagtacaaaatggccctgtacaatctgtaccctggggtgttcgaaaccgtggaaatgctgccttccaaggccggcatttggagagtggaatgtctgattggagagcacctccacgccggaatgagcaccctgtttctggtgtacagcaacaagtgtcagacccctctcggcatggcctctggacacatcagagacttccagatcaccgcctctggccagtacggacagtgggctcctaaactggctcggctgcactacagcggcagcatcaatgcctggtccaccaaagagcccttcagctggatcaaggtggacctgctggctcccatgatcatccacggaatcaagacccagggcgccagacagaagttcagcagcctgtacatcagccagttcatcatcatgtacagcctggacggcaagaagtggcagacctacagaggcaacagcaccggcacactcatggtgttcttcggcaacgtggactccagcggcattaagcacaacatcttcaaccctccaatcattgcccggtacatccggctgcaccccacacactacagcatccggtctaccctgagaatggaactgatgggctgcgacctgaacagctgctctatgcccctcggaatggaaagcaaggccatcagcgacgcccagatcacagccagcagctacttcaccaacatgttcgccacttggagcccctccaaggctagactgcatctgcagggcagaagcaacgcttggaggccccaagtgaacaaccccaaagagtggctgcaggttgactttcaaaagaccatgaaagtgaccggcgtgaccacacagggcgtcaagtctctgctgacctctatgtacgtgaaagagttcctgatctccagcagccaggacggccatcagtggaccctgtttttccagaacggcaaagtgaaagtgttccagggcaatcaggacagcttcacacccgtggtcaattctctggaccctccactgctgaccagatacctgcggattcaccctcagtcttgggtgcaccagatcgctctgcggatggaagtgctgggctgtgaagctcaggacctctactagttaattaagagcatcttaccgccatttattcccatatttgttctgtttttcttgatttgggtatacatttaaatgttaataaaacaaaatggtggggcaatcatttacatttttagggatatgtaattactagttcaggtgtattgccacaagacaaacatgttaagaaactttcccgttatttacgctctgttcctgttaatcaacctctggattacaaaatttgtgaaagattgactgatattcttaactatgttgctccttttacgctgtgtggatatgctgctttatagcctctgtatctagctattgcttcccgtacggctttcgttttctcctccttgtataaatcctggttgctgtctcttttagaggagttgtggcccgttgtccgtcaacgtggcgtggtgtgctctgtgtttgctgacgcaacccccactggctggggcattgccaccacctgtcaactcctttctgggactttcgctttccccctcccgatcgccacggcagaactcatcgccgcctgccttgcccgctgctggacaggggctaggttgctgggcactgataattccgtggtgttgtctgtgccttctagttgccagccatctgttgtttgcccctcccccgtgccttccttgaccctggaaggtgccactcccactgtcctttcctaataaaatgaggaaattgcatcgcattgtctgagtaggtgtcattctattctggggggtggggtggggcaggacagcaagggggaggattgggaagacaatagcaggcatgctggggatgcggtgggctctatggctctagagcatggctacgtagataagtagcatggcgggttaatcattaactacacctgcaggaggaacccctagtgatggagttggccactccctctctgcgcgctcgctcgctcactgaggccgggcgaccaaaggtcgcccgacgcccgggcggcctcagtgagcgagcgagcgcgcagctgcctgcaggggcgcgcctcgagccatggtgctagcagctgatgcatagcatgcggtaccgggagatgggggaggctaactgaaacacggaaggagacaataccggaaggaacccgcgctatgacggcaataaaaagacagaataaaacgcacgggtgttgggtcgtttgttcataaacgcggggttcggtcccagggctggcactctgtcgataccccaccgagaccccattgggaccaatacgcccgcgtttcttccttttccccaccccaacccccaagttcgggtgaaggcccagggctcgcagccaacgtcggggcggcaagccctgccatagccactacgggtacgtaggccaaccactagaactatagctagagtcctgggcgaacaaacgatgctcgccttccagaaaaccgaggatgcgaaccacttcatccggggtcagcaccaccggcaagcgccgcgacggccgaggtctaccgatctcctgaagccagggcagatccgtgcacagcaccttgccgtagaagaacagcaaggccgccaatgcctgacgatgcgtggagaccgaaaccttgcgctcgttcgccagccaggacagaaatgcctcgacttcgctgctgcccaaggttgccgggtgacgcacaccgtggaaacggatgaaggcacgaacccagttgacataagcctgttcggttcgtaaactgtaatgcaagtagcgtatgcgctcacgcaactggtccagaaccttgaccgaacgcagcggtggtaacggcgcagtggcggttttcatggcttgttatgactgtttttttgtacagtctatgcctcgggcatccaagcagcaagcgcgttacgccgtgggtcgatgtttgatgttatggagcagcaacgatgttacgcagcagcaacgatgttacgcagcagggcagtcgccctaaaacaaagttaggtggctcaagtatgggcatcattcgcacatgtaggctcggccctgaccaagtcaaatccatgcgggctgctcttgatcttttcggtcgtgagttcggagacgtagccacctactcccaacatcagccggactccgattacctcgggaacttgctccgtagtaagacattcatcgcgcttgctgccttcgaccaagaagcggttgttggcgctctcgcggcttacgttctgcccaggtttgagcagccgcgtagtgagatctatatctatgatctcgcagtctccggcgagcaccggaggcagggcattgccaccgcgctcatcaatctcctcaagcatgaggccaacgcgcttggtgcttatgtgatctacgtgcaagcagattacggtgacgatcccgcagtggctctctatacaaagttgggcatacgggaagaagtgatgcactttgatatcgacccaagtaccgccacctaacaattcgttcaagccgagatcggcttcccggccgcggagttgttcggtaaattgtcacaacgccgcgaatatagtctttaccatgcccttggccacgcccctctttaatacgacgggcaatttgcacttcagaaaatgaagagtttgctttagccataacaaaagtccagtatgctttttcacagcataactggactgatttcagtttacaactattctgtctagtttaagactttattgtcatagtttagatctattttgttcagtttaagactttattgtccgcccacacccgcttacgcagggcatccatttattactcaaccgtaaccgattttgccaggttacgcggctggtctgcggtgtgaaataccgcacagatgcgtaaggagaaaataccgcatcaggcgctcttccgcttcctcgctcactgactcgctgcgctcggtcgttcggctgcggcgagcggtatcagctcactcaaaggcggtaatacggttatccacagaatcaggggataacgcaggaaagaacatgtgagcaaaaggccagcaaaaggccaggaaccgtaaaaaggccgcgttgctggcgtttttccataggctccgcccccctgacgagcatcacaaaaatcgacgctcaagtcagaggtggcgaaacccgacaggactataaagataccaggcgtttccccctggaagctccctcgtgcgctctcctgttccgaccctgccgcttaccggatacctgtccgcctttctcccttcgggaagcgtggcgctttctcaatgctcacgctgtaggtatctcagttcggtgtaggtcgttcgctccaagctgggctgtgtgcacgaaccccccgttcagcccgaccgctgcgccttatccggtaactatcgtcttgagtccaacccggtaagacacgacttatcgccactggcagcagccactggtaacaggattagcagagcgaggtatgtaggcggtgctacagagttcttgaagtggtggcctaactacggctacactagaaggacagtatttggtatctgcgctctgctgaagccagttaccttcggaaaaagagttggtagctcttgatccggcaaacaaaccaccgctggtagcggtggtttttttgtttgcaagcagcagattacgcgcagaaaaaaaggatctcaagaagatcctttgatcttttctacggggtctgacgctcagtggaacgaaaactcacgttaagggattttggtcatgagattatcaaaaaggatcttcacctagatccttttaaattaaaaatgaagttttaaatcaatctaaagtatatatgagtaaacttggtctgacagttaccaatgcttaatcagtgaggcacctatctcagcgatctgtctatttcgttcatccatagttgcctgactccccgtcgtgtagataactacgatacgggagggcttaccatctggccccagtgctgcaatgataccgcgagacccacgctcaccggctccagatttatcagcaataaaccagccagccggaagggccgagcgcagaagtggtcctgcaactttatccgcctccatccagtctattaattgttgccgggaagctagagtaagtagttcgccagttaatagtttgcgcaacgttgttgccattgctacaggcatcgtggtgtcacgctcgtcgtttggtatggcttcattcagctccggttcccaacgatcaaggcgagttacatgatcccccatgttgtgcaaaaaagcggttagctccttcggtcctccgatcgttgtcagaagtaagttggccgcagtgttatcactcatggttatggcagcactgcataattctcttactgtcatgccatccgtaagatgcttttctgtgactggtgagtactcaaccaagtcattctgagaatagtgtatgcggcgaccgagttgctcttgcccggcgtcaatacgggataataccgcgccacatagcagaactttaaaagtgctcatcattggaaaacgttcttcggggcgaaaactctcaaggatcttaccgctgttgagatccagttcgatgtaacccactcgtgcacccaactgatcttcagcatcttttactttcaccagcgtttctgggtgagcaaaaacaggaaggcaaaatgccgcaaaaaagggaataagggcgacacggaaatgttgaatactcatactcttcctttttcaatattattgaagcatttatcagggttattgtctcatgagcggatacatatttgaatgtatttagaaaaataaacaaataggggttccgcgcacatttccccgaaaagtgccacctgaaattgtaaacgttaatattttgttaaaattcgcgttaaatttttgttaaatcagctcattttttaaccaataggccgaaatcggcaaaatcccttataaatcaaaagaatagaccgagatagggttgagtgttgttccagtttggaacaagagtccactattaaagaacgtggactccaacgtcaaagggcgaaaaaccgtctatcagggcgatggcccactacgtgaaccatcaccctaatcaagttttttggggtcgaggtgccgtaaagcactaaatcggaaccctaaagggagcccccgatttagagcttgacggggaaagccggcgaacgtggcgagaaaggaagggaagaaagcgaaaggagcgggcgctagggcgctggcaagtgtagcggtcacgctgcgcgtaaccaccacacccgccgcgcttaatgcgccgctacagggcgcgtcccattcgccattcaggctgcaaataagcgttgatattcagtcaattacaaacattaataacgaagagatgacagaaaaattttcattctgtgacagagaa

SEQ ID NO: 203 - DNA, 9871 bp, synthetic construct
  misc_feature 1..9871: note = Description of Artificial Sequence: Synthetic polynucleotide
  source 1..9871: mol_type = other DNA
ggccggcccctgcaggcagctgcgcgctcgctcgctcactgaggccgcccgggcaaagcccgggcgtcgggcgacctttggtcgcccggcctcagtgagcgagcgagcgcgcagagagggagtggccaactccatcactaggggttccttgtagttaatgattaacccgccatgctacttatctacgtagccatgctctagagtttgctgcttgcaatgtttgcccattttagggtggacacaggacgctgtggtttctgagccagggggcgactcagatcccagccagtggacttagcccctgtttgctcctccgataactggggtgaccttggttaatattcaccagcagcctcccccgttgcccctctggatccactgcttaaatacggacgaggacagggccctgtctcctcagcttcaggcaccaccactgacctgggacagtgaatcgccaccatgcagattgagctgagcacctgcttcttcctgtgcctgctgaggttctgcttctctgccaccaggagatactacctgggggctgtggagctgagctgggactacatgcagtctgacctgggggagctgcctgtggatgccaggttcccccccagagtgcccaagagcttccccttcaacacctctgtggtgtacaagaagaccctgtttgtggagttcactgaccacctgttcaacattgccaagcccaggcccccctggatgggcctgctgggccccaccatccaggctgaggtgtatgacactgtggtgatcaccctgaagaacatggccagccaccctgtgagcctgcatgctgtgggggtgagctactggaaggcctctgagggggctgagtatgatgaccagaccagccagagggagaaggaggatgacaaggtgttccctgggggcagccacacctatgtgtggcaggtgctgaaggagaatggccccatggcctctgaccccctgtgcctgacctacagctacctgagccatgtggacctggtgaaggacctgaactctggcctgattggggccctgctggtgtgcagggagggcagcctggccaaggagaagacccagaccctgcacaagttcatcctgctgtttgctgtgtttgatgagggcaagagctggcactctgaaaccaagaacagcctgatgcaggacagggatgctgcctctgccagggcctggcccaagatgcacactgtgaatggctatgtgaacaggagcctgcctggcctgattggctgccacaggaagtctgtgtactggcatgtgattggcatgggcaccacccctgaggtgcacagcatcttcctggagggccacaccttcctggtcaggaaccacaggcaggccagcctggagatcagccccatcaccttcctgactgcccagaccctgctgatggacctgggccagttcctgctgttctgccacatcagcagccaccagcatgatggcatggaggcctatgtgaaggtggacagctgccctgaggagccccagctgaggatgaagaacaatgaggaggctgaggactatgatgatgacctgactgactctgagatggatgtggtgaggtttgatgatgacaacagccccagcttcatccagatcaggtctgtggccaagaagcaccccaagacctgggtgcactacattgctgctgaggaggaggactgggactatgcccccctggtgctggcccctgatgacaggagctacaagagccagtacctgaacaatggcccccagaggattggcaggaagtacaagaaggtcaggttcatggcctacactgatgaaaccttcaagaccagggaggccatccagcatgagtctggcatcctgggccccctgctgtatggggaggtgggggacaccctgctgatcatcttcaagaaccaggccagcaggccctacaacatctacccccatggcatcactgatgtgaggcccctgtacagcaggaggctgcccaagggggtgaagcacctgaaggacttccccatcctgcctggggagatcttcaagtacaagtggactgtgactgtggaggatggccccaccaagtctgaccccaggtgcctgaccagatactacagcagctttgtgaacatggagagggacctggcctctggcctgattggccccctgctgatctgctacaaggagtctgtggaccagaggggcaaccagatcatgtctgacaagaggaatgtgatcctgttctctgtgtttgatgagaacaggagctggtacctgactgagaacatccagaggttcctgcccaaccctgctggggtgcagctggaggaccctgagttccaggccagcaacatcatgcacagcatcaatggctatgtgtttgacagcctgcagctgtctgtgtgcctgcatgaggtggcctactggtacatcctgagcattggggcccagactgacttcctgtctgtgttcttctctggctacaccttcaagcacaagatggtgtatgaggacaccctgaccctgttccccttctctggggagactgtgttcatgagcatggagaaccctggcctgtggattctgggctgccacaactctgacttcaggaacaggggcatgactgccctgctgaaagtctccagctgtgacaagaacactggggactactatgaggacagctatgaggacatctctgcctacctgctgagcaagaacaatgccattgagcccaggagcttcagccagaaccccccagtgctgaagaggcaccagagggagatcaccaggaccaccctgcagtctgaccaggaggagattgactatgatgacaccatctctgtggagatgaagaaggaggactttgacatctacgacgaggacgagaaccagagccccaggagcttccagaagaagaccaggcactacttcattgctgctgtggagaggctgtgggactatggcatgagcagcagcccccatgtgctgaggaacagggcccagtctggctctgtgccccagttcaagaaggtggtgttccaggagttcactgatggcagcttcacccagcccctgtacagaggggagctgaatgagcacctgggcctgctgggcccctacatcagggctgaggtggaggacaacatcatggtgaccttcaggaaccaggccagcaggccctacagcttctacagcagcctgatcagctatgaggaggaccagaggcagggggctgagcccaggaagaactttgtgaagcccaatgaaaccaagacctacttctggaaggtgcagcaccacatggcccccaccaaggatgagtttgactgcaaggcctgggcctacttctctgatgtggacctggagaaggatgtgcactctggcctgattggccccctgctggtgtgccacaccaacaccctgaaccctgcccatggcaggcaggtgactgtgcaggagtttgccctgttcttcaccatctttgatgaaaccaagagctggtacttcactgagaacatggagaggaactgcagggccccctgcaacatccagatggaggaccccaccttcaaggagaactacaggttccatgccatcaatggctacatcatggacaccctgcctggcctggtgatggcccaggaccagaggatcaggtggtacctgctgagcatgggcagcaatgagaacatccacagcatccacttctctggccatgtgttcactgtgaggaagaaggaggagtacaagatggccctgtacaacctgtaccctggggtgtttgagactgtggagatgctgcccagcaaggctggcatctggagggtggagtgcctgattggggagcacctgcatgctggcatgagcaccctgttcctggtgtacagcaacaagtgccagacccccctgggcatggcctctggccacatcagggacttccagatcactgcctctggccagtatggccagtgggcccccaagctggccaggctgcactactctggcagcatcaatgcctggagcaccaaggagcccttcagctggatcaaggtggacctgctggcccccatgatcatccatggcatcaagacccagggggccaggcagaagttcagcagcctgtacatcagccagttcatcatcatgtacagcctggatggcaagaagtggcagacctacaggggcaacagcactggcaccctgatggtgttctttggcaatgtggacagctctggcatcaagcacaacatcttcaacccccccatcattgccagatacatcaggctgcaccccacccactacagcatcaggagcaccctgaggatggagctgatgggctgtgacctgaacagctgcagcatgcccctgggcatggagagcaaggccatctctgatgcccagatcactgccagcagctacttcaccaacatgtttgccacctggagccccagcaaggccaggctgcacctgcagggcaggagcaatgcctggaggccccaggtcaacaaccccaaggagtggctgcaggtggacttccagaagaccatgaaggtgactggggtgaccacccagggggtgaagagcctgctgaccagcatgtatgtgaaggagttcctgatcagcagcagccaggatggccaccagtggaccctgttcttccagaatggcaaggtgaaggtgttccagggcaaccaggacagcttcacccctgtggtgaacagcctggacccccccctgctgaccagatacctgaggattcacccccagagctgggtgcaccagattgccctgaggatggaggtgctgggctgtgaggcccaggacctgtactgaaataaaagatctttattttcattagatctgtgtgttggttttttgtgtgtctagagcatggctacgtagataagtagcatggcgggttaatcattaactacacctgcaggaggaacccctagtgatggagttggccactccctctctgcgcgctcgctcgctcactgaggccgggcgaccaaaggtcgcccgacgcccgggcggcctcagtgagcgagcgagcgcgcagctgcctgcaggggcgcgcctcgaggcatgcggtaccaagcttgtcgagaagtactagaggatcataatcagccataccacatttgtagaggttttacttgctttaaaaaacctcccacacctccccctgaacctgaaacataaaatgaatgcaattgttgttgttaacttgtttattgcagcttataatggttacaaataaagcaatagcatcacaaatttcacaaataaagcatttttttcactgcattctagttgtggtttgtccaaactcatcaatgtatcttatcatgtctggatctgatcactgatatcgcctaggagatccgaaccagataagtgaaatctagttccaaactattttgtcatttttaattttcgtattagcttacgacgctacacccagttcccatctattttgtcactcttccctaaataatccttaaaaactccatttccacccctcccagttcccaactattttgtccgcccacagcggggcatttttcttcctgttatgtttttaatcaaacatcctgccaactccatgtgacaaaccgtcatcttcggctactttttctctgtcacagaatgaaaatttttctgtcatctcttcgttattaatgtttgtaattgactgaatatcaacgcttatttgcagcctgaatggcgaatgggacgcgccctgtagcggcgcattaagcgcggcgggtgtggtggttacgcgcagcgtgaccgctacacttgccagcgccctagcgcccgctcctttcgctttcttcccttcctttctcgccacgttcgccggctttccccgtcaagctctaaatcgggggctccctttagggttccgatttagtgctttacggcacctcgaccccaaaaaacttgattagggtgatggttcacgtagtgggccatcgccctgatagacggtttttcgccctttgacgttggagtccacgttctttaatagtggactcttgttccaaactggaacaacactcaaccctatctcggtctattcttttgatttataagggattttgccgatttcggcctattggttaaaaaatgagctgatttaacaaaaatttaacgcgaattttaacaaaatattaacgtttacaatttcaggtggcacttttcggggaaatgtgcgcggaacccctatttgtttatttttctaaatacattcaaatatgtatccgctcatgagacaataaccctgataaatgcttcaataatattgaaaaaggaagagtatgagtattcaacatttccgtgtcgcccttattcccttttttgcggcattttgccttcctgtttttgctcacccagaaacgctggtgaaagtaaaagatgctgaagatcagttgggtgcacgagtgggttacatcgaactggatctcaacagcggtaagatccttgagagttttcgccccgaagaacgttttccaatgatgagcacttttaaagttctgctatgtggcgcggtattatcccgtattgacgccgggcaagagcaactcggtcgccgcatacactattctcagaatgacttggttgagtactcaccagtcacagaaaagcatcttacggatggcatgacagtaagagaattatgcagtgctgccataaccatgagtgataacactgcggccaacttacttctgacaacgatcggaggaccgaaggagctaaccgcttttttgcacaacatgggggatcatgtaactcgccttgatcgttgggaaccggagctgaatgaagccataccaaacgacgagcgtgacaccacgatgcctgtagcaatggcaacaacgttgcgcaaactattaactggcgaactacttactctagcttcccggcaacaattaatagactggatggaggcggataaagttgcaggaccacttctgcgctcggcccttccggctggctggtttattgctgataaatctggagccggtgagcgtgggtctcgcggtatcattgcagcactggggccagatggtaagccctcccgtatcgtagttatctacacgacggggagtcaggcaactatggatgaacgaaatagacagatcgctgagataggtgcctcactgattaagcattggtaactgtcagaccaagtttactcatatatactttagattgatttaaaacttcatttttaatttaaaaggatctaggtgaagatcctttttgataatctcatgaccaaaatcccttaacgtgagttttcgttccactgagcgtcagaccccgtagaaaagatcaaaggatcttcttgagatcctttttttctgcgcgtaatctgctgcttgcaaacaaaaaaaccaccgctaccagcggtggtttgtttgccggatcaagagctaccaactctttttccgaaggtaactggcttcagcagagcgcagataccaaatactgtccttctagtgtagccgtagttaggccaccacttcaagaactctgtagcaccgcctacatacctcgctctgctaatcctgttaccagtggctgctgccagtggcgataagtcgtgtcttaccgggttggactcaagacgatagttaccggataaggcgcagcggtcgggctgaacggggggttcgtgcacacagcccagcttggagcgaacgacctacaccgaactgagatacctacagcgtgagcattgagaaagcgccacgcttcccgaagggagaaaggcggacaggtatccggtaagcggcagggtcggaacaggagagcgcacgagggagcttccagggggaaacgcctggtatctttatagtcctgtcgggtttcgccacctctgacttgagcgtcgatttttgtgatgctcgtcaggggggcggagcctatggaaaaacgccagcaacgcggcctttttacggttcctggccttttgctggccttttgctcacatgttctttcctgcgttatcccctgattctgtggataaccgtattaccgcctttgagtgagctgataccgctcgccgcagccgaacgaccgagcgcagcgagtcagtgagcgaggaagcggaagagcgcctgatgcggtattttctccttacgcatctgtgcggtatttcacaccgcagaccagccgcgtaacctggcaaaatcggttacggttgagtaataaatggatgccctgcgtaagcgggtgtgggcggacaataaagtcttaaactgaacaaaatagatctaaactatgacaataaagtcttaaactagacagaatagttgtaaactgaaatcagtccagttatgctgtgaaaaagcatactggacttttgttatggctaaagcaaactcttcattttctgaagtgcaaattgcccgtcgtattaaagaggggcgtggccaagggcatggtaaagactatattcgcggcgttgtgacaatttaccgaacaactccgcggccgggaagccgatctcggcttgaacgaattgttaggtggcggtacttgggtcgatatcaaagtgcatcacttcttcccgtatgcccaactttgtatagagagccactgcgggatcgtcaccgtaatctgcttgcacgtagatcacataagcaccaagcgcgttggcctcatgcttgaggagattgatgagcgcggtggcaatgccctgcctccggtgctcgccggagactgcgagatcatagatatagatctcactacgcggctgctcaaacctgggcagaacgtaagccgcgagagcgccaacaaccgcttcttggtcgaaggcagcaagcgcgatgaatgtcttactacggagcaagttcccgaggtaatcggagtccggctgatgttgggagtaggtggctacgtctccgaactcacgaccgaaaagatcaagagcagcccgcatggatttgacttggtcagggccgagcctacatgtgcgaatgatgcccatacttgagccacctaactttgttttagggcgactgccctgctgcgtaacatcgttgctgctgcgtaacatcgttgctgctccataacatcaaacatcgacccacggcgtaacgcgcttgctgcttggatgcccgaggcatagactgtacaaaaaaacagtcataacaagccatgaaaaccgccactgcgccgttaccaccgctgcgttcggtcaaggttctggaccagttgcgtgagcgcatacgctacttgcattacagtttacgaaccgaacaggcttatgtcaactgggttcgtgccttcatccgtttccacggtgtgcgtcacccggcaaccttgggcagcagcgaagtcgaggcatttctgtcctggctggcgaacgagcgcaaggtttcggtctccacgcatcgtcaggcattggcggccttgctgttcttctacggcaaggtgctgtgcacggatctgccctggcttcaggagatcggaagacctcggccgtcgcggcgcttgccggtggtgctgaccccggatgaagtggttcgcatcctcggttttctggaaggcgagcatcgtttgttcgcccaggactctagctatagttctagtggttggctacgtatactccggaatattaatagatcatggagataattaaaatgataaccatctcgcaaataaataagtattttactgttttcgtaacagttttgtaataaaaaaacctataaatattccggattattcataccgtcccaccatcgggcgcggatctcggtccgaaaccatgtcgtactaccatcaccatcaccatcacgattacgatatcccaacgaccgaaaacctgtattttcagggcgccatgggatcc

SEQ ID NO: 204 - DNA, 9969 bp, synthetic construct
  misc_feature 1..9969: note = Description of Artificial Sequence: Synthetic polynucleotide
  source 1..9969: mol_type = other DNA
ggccggcccctgcaggcagctgcgcgctcgctcgctcactgaggccgcccgggcaaagcccgggcgtcgggcgacctttggtcgcccggcctcagtgagcgagcgagcgcgcagagagggagtggccaactccatcactaggggttccttgtagttaatgattaacccgccatgctacttatctacgtagccatgctctagagtctgtctgcacatttcgtagagcgagtgttccgatactctaatctccctaggcaaggttcatattgacttaggttacttattctccttttgttgactaagtcaataatcagaatcagcaggtttggagtcagcttggcagggatcagcagcctgggttggaaggagggggtataaaagccccttcaccaggagaagccgtcacacagatccacaagctcctgctagcaggtaagtgccgtgtgtggttcccgcgggcctggcctctttacgggttatggcccttgcgtgccttgaattactgacactgacatccactttttctttttctccacaggtttaaacgccaccatgcagattgagctgagcacctgcttcttcctgtgtctgctgaggttctgcttctctgccaccaggaggtattacctgggggctgtggagctgagctgggactatatgcagtctgacctgggggagctgcctgtggatgctaggttcccccccagggtgcccaagagcttcccctttaacacttctgtggtgtacaagaagaccctgtttgtggagttcactgaccacctgttcaacattgccaagcccaggcccccctggatggggctgctggggcccaccatccaggctgaggtgtatgacactgtggtgatcaccctgaagaacatggccagccaccctgtgagcctgcatgctgtgggggtgagctactggaaggcttctgagggggctgagtatgatgaccagactagccagagggagaaggaggatgacaaggtgtttcctgggggcagccatacctatgtgtggcaggtgctgaaggagaatggccccatggcctctgaccccctgtgcctgacctacagctacctgtctcatgtggacctggtgaaggacctgaactctggcctgattggggctctgctggtgtgtagggagggcagcctggctaaggaaaagacccagaccctgcataagtttatcctgctgtttgctgtgtttgatgagggcaagagctggcactctgagaccaagaacagcctgatgcaggatagggatgctgcctctgccagggcttggcctaagatgcacactgtgaatgggtatgtgaataggagcctgcctggcctgattggctgccacaggaagtctgtgtactggcatgtgattgggatgggcaccacccctgaggtccatagcatcttcctggagggccacactttcctggtgaggaaccacagacaggcctctctggagatctctcccatcaccttcctgactgctcagactctgctgatggacctgggccagttcctgctgttttgccatattagcagccaccagcatgatgggatggaggcctatgtgaaggtggatagctgccctgaggagcctcagctgaggatgaagaacaatgaggaggctgaagactatgatgatgacctgactgattctgagatggatgtggtgaggtttgatgatgacaatagccccagcttcattcagatcaggtctgtggccaagaaacaccccaagacctgggtgcactacattgctgctgaggaagaggactgggactatgctcccctggtgctggcccctgatgataggtcttataagagccagtacctgaacaatgggccccagaggattggcaggaagtacaagaaggtgaggttcatggcctacactgatgaaaccttcaaaaccagggaggccattcagcatgagtctggcatcctgggccctctgctgtatggggaggtgggggacaccctgctgatcatcttcaagaaccaggccagcaggccctacaacatctatcctcatggcatcactgatgtgaggcccctgtacagcaggaggctgcccaagggggtgaagcacctgaaagacttccccatcctgcctggggagatctttaagtataagtggactgtgactgtggaggatggccctaccaagtctgaccccaggtgtctgaccaggtactattctagctttgtgaacatggagagggacctggcctctggcctgattgggcccctgctgatctgctacaaggagtctgtggaccagaggggcaaccagatcatgtctgacaagaggaatgtgatcctgttttctgtgtttgatgagaataggagctggtacctgactgagaacatccagaggtttctgcccaatcctgctggggtgcagctggaggatcctgagttccaggccagcaatatcatgcatagcatcaatggctatgtgtttgacagcctgcagctgtctgtgtgcctgcatgaggtggcctactggtacatcctgagcattggggcccagactgactttctgtctgtgttcttttctggctataccttcaagcacaagatggtgtatgaggataccctgaccctgttccccttctctggggagactgtgttcatgagcatggagaatcctgggctgtggatcctggggtgccacaactctgattttaggaacagggggatgactgccctgctgaaggtgtctagctgtgataagaacactggggactactatgaggacagctatgaggacatttctgcttatctgctgtctaagaataatgccattgagcccagaagcttcagccagaatccccctgtgctgaagagacatcagagggagatcaccagaactaccctgcagtctgatcaggaggagattgactatgatgacactatctctgtggagatgaagaaggaggactttgacatctatgatgaggatgagaatcagtctcccaggagctttcagaagaagaccagacattacttcattgctgctgtggagaggctgtgggactatggcatgagctctagccctcatgtgctgaggaacagggcccagtctggctctgtgccccagttcaagaaggtggtgttccaggaattcactgatggcagcttcacccagcccctgtacaggggggagctgaatgagcacctgggcctgctggggccttatatcagggctgaggtggaggataatattatggtgactttcaggaaccaggccagcaggccctactctttctatagcagcctgatctcttatgaggaggatcagaggcagggggctgagcctaggaagaactttgtgaagcccaatgagactaagacctacttctggaaggtccagcaccacatggcccctaccaaggatgagtttgactgcaaggcctgggcctatttctctgatgtggatctggagaaggatgtccattctgggctgattggccccctgctggtgtgccacactaacactctgaatcctgcccatggcaggcaggtgactgtccaggagtttgccctgttcttcactatctttgatgagaccaagagctggtactttactgagaacatggagaggaactgcagagctccttgcaatattcagatggaggaccccaccttcaaggagaattacaggttccatgccattaatgggtacatcatggacaccctgcctggcctggtgatggctcaggaccagaggatcaggtggtacctgctgagcatgggctctaatgagaatatccacagcatccacttctctgggcatgtgttcactgtgaggaagaaggaggagtacaagatggctctgtataatctgtaccctggggtgtttgaaactgtggagatgctgccctctaaggctggcatctggagggtggagtgcctgattggggagcacctgcatgctggcatgagcaccctgttcctggtgtacagcaacaagtgccagacccccctgggcatggcctctggccacatcagggacttccagatcactgcctctggccagtatggccagtgggcccccaagctggccaggctgcactattctggcagcatcaatgcctggagcaccaaggagcccttcagctggatcaaggtggacctgctggcccccatgatcattcatggcatcaagacccagggggccaggcagaagttcagctctctgtacatctctcagttcatcatcatgtactctctggatgggaagaagtggcagacctacaggggcaacagcactggcaccctgatggtgttctttgggaatgtggactcttctggcatcaagcacaacatcttcaatccccccatcattgctaggtatattaggctgcatcccacccactacagcatcaggtctaccctgaggatggagctgatgggctgtgacctgaactcttgcagcatgcccctgggcatggagtctaaggccatctctgatgcccagattactgccagcagctacttcaccaacatgtttgccacctggagcccctctaaggccaggctgcatctgcaggggaggagcaatgcctggaggcctcaggtgaacaaccccaaggagtggctgcaggtggatttccagaagaccatgaaggtgactggggtgaccacccagggggtcaagagcctgctgaccagcatgtatgtgaaggagttcctgatcagcagcagccaggatggccaccagtggactctgttctttcagaatgggaaggtgaaggtgtttcagggcaatcaggactctttcacccctgtggtgaacagcctggacccccccctgctgaccagatacctgaggatccacccccagtcttgggtgcatcagattgccctgaggatggaggtgctgggctgtgaggctcaggatctgtactgagcggccgcaataaaagatcagagctctagagatctgtgtgttggttttttgtgttctagagcatggctacgtagataagtagcatggcgggttaatcattaactacacctgcaggaggaacccctagtgatggagttggccactccctctctgcgcgctcgctcgctcactgaggccgggcgaccaaaggtcgcccgacgcccgggcggcctcagtgagcgagcgagcgcgcagctgcctgcaggggcgcgcctcgaggcatgcggtaccaagcttgtcgagaagtactagaggatcataatcagccataccacatttgtagaggttttacttgctttaaaaaacctcccacacctccccctgaacctgaaacataaaatgaatgcaattgttgttgttaacttgtttattgcagcttataatggttacaaataaagcaatagcatcacaaatttcacaaataaagcatttttttcactgcattctagttgtggtttgtccaaactcatcaatgtatcttatcatgtctggatctgatcactgatatcgcctaggagatccgaaccagataagtgaaatctagttccaaactattttgtcatttttaattttcgtattagcttacgacgctacacccagttcccatctattttgtcactcttccctaaataatccttaaaaactccatttccacccctcccagttcccaactattttgtccgcccacagcggggcatttttcttcctgttatgtttttaatcaaacatcctgccaactccatgtgacaaaccgtcatcttcggctactttttctctgtcacagaatgaaaatttttctgtcatctcttcgttattaatgtttgtaattgactgaatatcaacgcttatttgcagcctgaatggcgaatgggacgcgccctgtagcggcgcattaagcgcggcgggtgtggtggttacgcgcagcgtgaccgctacacttgccagcgccctagcgcccgctcctttcgctttcttcccttcctttctcgccacgttcgccggctttccccgtcaagctctaaatcgggggctccctttagggttccgatttagtgctttacggcacctcgaccccaaaaaacttgattagggtgatggttcacgtagtgggccatcgccctgatagacggtttttcgccctttgacgttggagtccacgttctttaatagtggactcttgttccaaactggaacaacactcaaccctatctcggtctattcttttgatttataagggattttgccgatttcggcctattggttaaaaaatgagctgatttaacaaaaatttaacgcgaattttaacaaaatattaacgtttacaatttcaggtggcacttttcggggaaatgtgcgcggaacccctatttgtttatttttctaaatacattcaaatatgtatccgctcatgagacaataaccctgataaatgcttcaataatattgaaaaaggaagagtatgagtattcaacatttccgtgtcgcccttattcccttttttgcggcattttgccttcctgtttttgctcacccagaaacgctggtgaaagtaaaagatgctgaagatcagttgggtgcacgagtgggttacatcgaactggatctcaacagcggtaagatccttgagagttttcgccccgaagaacgttttccaatgatgagcacttttaaagttctgctatgtggcgcggtattatcccgtattgacgccgggcaagagcaactcggtcgccgcatacactattctcagaatgacttggttgagtactcaccagtcacagaaaagcatcttacggatggcatgacagtaagagaattatgcagtgctgccataaccatgagtgataacactgcggccaacttacttctgacaacgatcggaggaccgaaggagctaaccgcttttttgcacaacatgggggatcatgtaactcgccttgatcgttgggaaccggagctgaatgaagccataccaaacgacgagcgtgacaccacgatgcctgtagcaatggcaacaacgttgcgcaaactattaactggcgaactacttactctagcttcccggcaacaattaatagactggatggaggcggataaagttgcaggaccacttctgcgctcggcccttccggctggctggtttattgctgataaatctggagccggtgagcgtgggtctcgcggtatcattgcagcactggggccagatggtaagccctcccgtatcgtagttatctacacgacggggagtcaggcaactatggatgaacgaaatagacagatcgctgagataggtgcctcactgattaagcattggtaactgtcagaccaagtttactcatatatactttagattgatttaaaacttcatttttaatttaaaaggatctaggtgaagatcctttttgataatctcatgaccaaaatcccttaacgtgagttttcgttccactgagcgtcagaccccgtagaaaagatcaaaggatcttcttgagatcctttttttctgcgcgtaatctgctgcttgcaaacaaaaaaaccaccgctaccagcggtggtttgtttgccggatcaagagctaccaactctttttccgaaggtaactggcttcagcagagcgcagataccaaatactgtccttctagtgtagccgtagttaggccaccacttcaagaactctgtagcaccgcctacatacctcgctctgctaatcctgttaccagtggctgctgccagtggcgataagtcgtgtcttaccgggttggactcaagacgatagttaccggataaggcgcagcggtcgggctgaacggggggttcgtgcacacagcccagcttggagcgaacgacctacaccgaactgagatacctacagcgtgagcattgagaaagcgccacgcttcccgaagggagaaaggcggacaggtatccggtaagcggcagggtcggaacaggagagcgcacgagggagcttccagggggaaacgcctggtatctttatagtcctgtcgggtttcgccacctctgacttgagcgtcgatttttgtgatgctcgtcaggggggcggagcctatggaaaaacgccagcaacgcggcctttttacggttcctggccttttgctggccttttgctcacatgttctttcctgcgttatcccctgattctgtggataaccgtattaccgcctttgagtgagctgataccgctcgccgcagccgaacgaccgagcgcagcgagtcagtgagcgaggaagcggaagagcgcctgatgcggtattttctccttacgcatctgtgcggtatttcacaccgcagaccagccgcgtaacctggcaaaatcggttacggttgagtaataaatggatgccctgcgtaagcgggtgtgggcggacaataaagtcttaaactgaacaaaatagatctaaactatgacaataaagtcttaaactagacagaatagttgtaaactgaaatcagtccagttatgctgtgaaaaagcatactggacttttgttatggctaaagcaaactcttcattttctgaagtgcaaattgcccgtcgtattaaagaggggcgtggccaagggcatggtaaagactatattcgcggcgttgtgacaatttaccgaacaactccgcggccgggaagccgatctcggcttgaacgaattgttaggtggcggtacttgggtcgatatcaaagtgcatcacttcttcccgtatgcccaactttgtatagagagccactgcgggatcgtcaccgtaatctgcttgcacgtagatcacataagcaccaagcgcgttggcctcatgcttgaggagattgatgagcgcggtggcaatgccctgcctccggtgctcgccggagactgcgagatcatagatatagatctcactacgcggctgctcaaacctgggcagaacgtaagccgcgagagcgccaacaaccgcttcttggtcgaaggcagcaagcgcgatgaatgtcttactacggagcaagttcccgaggtaatcggagtccggctgatgttgggagtaggtggctacgtctccgaactcacgaccgaaaagatcaagagcagcccgcatggatttgacttggtcagggccgagcctacatgtgcgaatgatgcccatacttgagccacctaactttgttttagggcgactgccctgctgcgtaacatcgttgctgctgcgtaacatcgttgctgctccataacatcaaacatcgacccacggcgtaacgcgcttgctgcttggatgcccgaggcatagactgtacaaaaaaacagtcataacaagccatgaaaaccgccactgcgccgttaccaccgctgcgttcggtcaaggttctggaccagttgcgtgagcgcatacgctacttgcattacagtttacgaaccgaacaggcttatgtcaactgggttcgtgccttcatccgtttccacggtgtgcgtcacccggcaaccttgggcagcagcgaagtcgaggcatttctgtcctggctggcgaacgagcgcaaggtttcggtctccacgcatcgtcaggcattggcggccttgctgttcttctacggcaaggtgctgtgcacggatctgccctggcttcaggagatcggaagacctcggccgtcgcggcgcttgccggtggtgctgaccccggatgaagtggttcgcatcctcggttttctggaaggcgagcatcgtttgttcgcccaggactctagctatagttctagtggttggctacgtatactccggaatattaatagatcatggagataattaaaatgataaccatctcgcaaataaataagtattttactgttttcgtaacagttttgtaataaaaaaacctataaatattccggattattcataccgtcccaccatcgggcgcggatctcggtccgaaaccatgtcgtactaccatcaccatcaccatcacgattacgatatcccaacgaccgaaaacctgtattttcagggcgccatgggatcc

SEQ ID NO: 205 - DNA, 10063 bp, synthetic construct
  misc_feature 1..10063: note = Description of Artificial Sequence: Synthetic polynucleotide
  source 1..10063: mol_type = other DNA
ggccggcccctgcaggcagctgcgcgctcgctcgctcactgaggccgcccgggcaaagcccgggcgtcgggcgacctttggtcgcccggcctcagtgagcgagcgagcgcgcagagagggagtggccaactccatcactaggggttccttgtagttaatgattaacccgccatgctacttatctacgtagccatgctctagaggaaccattgccaccttcagggggaggctgctggtgaatattaaccaagatcaccccagttaccggaggagcaaacagggactaagttcacacgcgtggtaccgtctgtctgcacatttcgtagagcgagtgttccgatactctaatctccctaggcaaggttcatatttgtgtaggttacttattctccttttgttgactaagtcaataatcagaatcagcaggtttggagtcagcttggcagggatcagcagcctgggttggaaggagggggtataaaagccccttcaccaggagaagccgtcacacagatccacaagctcctgaagaggtaagggtttaagttatcgttagttcgtgcaccattaatgtttaattacctggagcacctgcctgaaatcatttttttttcaggttggctagtatgcagatcgagctctccacctgcttctttctgtgcctgttgagattctgcttcagcgccaccaggagatactacctgggggctgtggagctgagctgggactacatgcagtctgacctgggggagctgcctgtggatgccaggttcccccccagagtgcccaagagcttccccttcaacacctctgtggtgtacaagaagaccctgtttgtggagttcactgaccacctgttcaacattgccaagcccaggcccccctggatgggcctgctgggccccaccatccaggctgaggtgtatgacactgtggtgatcaccctgaagaacatggccagccaccctgtgagcctgcatgctgtgggggtgagctactggaaggcctctgagggggctgagtatgatgaccagaccagccagagggagaaggaggatgacaaggtgttccctgggggcagccacacctatgtgtggcaggtgctgaaggagaatggccccatggcctctgaccccctgtgcctgacctacagctacctgagccatgtggacctggtgaaggacctgaactctggcctgattggggccctgctggtgtgcagggagggcagcctggccaaggagaagacccagaccctgcacaagttcatcctgctgtttgctgtgtttgatgagggcaagagctggcactctgaaaccaagaacagcctgatgcaggacagggatgctgcctctgccagggcctggcccaagatgcacactgtgaatggctatgtgaacaggagcctgcctggcctgattggctgccacaggaagtctgtgtactggcatgtgattggcatgggcaccacccctgaggtgcacagcatcttcctggagggccacaccttcctggtcaggaaccacaggcaggccagcctggagatcagccccatcaccttcctgactgcccagaccctgctgatggacctgggccagttcctgctgttctgccacatcagcagccaccagcatgatggcatggaggcctatgtgaaggtggacagctgccctgaggagccccagctgaggatgaagaacaatgaggaggctgaggactatgatgatgacctgactgactctgagatggatgtggtgaggtttgatgatgacaacagccccagcttcatccagatcaggtctgtggccaagaagcaccccaagacctgggtgcactacattgctgctgaggaggaggactgggactatgcccccctggtgctggcccctgatgacaggagctacaagagccagtacctgaacaatggcccccagaggattggcaggaagtacaagaaggtcaggttcatggcctacactgatgaaaccttcaagaccagggaggccatccagcatgagtctggcatcctgggccccctgctgtatggggaggtgggggacaccctgctgatcatcttcaagaaccaggccagcaggccctacaacatctacccccatggcatcactgatgtgaggcccctgtacagcaggaggctgcccaagggggtgaagcacctgaaggacttccccatcctgcctggggagatcttcaagtacaagtggactgtgactgtggaggatggccccaccaagtctgaccccaggtgcctgaccagatactacagcagctttgtgaacatggagagggacctggcctctggcctgattggccccctgctgatctgctacaaggagtctgtggaccagaggggcaaccagatcatgtctgacaagaggaatgtgatcctgttctctgtgtttgatgagaacaggagctggtacctgactgagaacatccagaggttcctgcccaaccctgctggggtgcagctggaggaccctgagttccaggccagcaacatcatgcacagcatcaatggctatgtgtttgacagcctgcagctgtctgtgtgcctgcatgaggtggcctactggtacatcctgagcattggggcccagactgacttcctgtctgtgttcttctctggctacaccttcaagcacaagatggtgtatgaggacaccctgaccctgttccccttctctggggagactgtgttcatgagcatggagaaccctggcctgtggattctgggctgccacaactctgacttcaggaacaggggcatgactgccctgctgaaagtctccagctgtgacaagaacactggggactactatgaggacagctatgaggacatctctgcctacctgctgagcaagaacaatgccattgagcccaggagcttcagccagaatccacccgtccttaagcgccatcagcgcgagatcaccaggaccaccctgcagtctgaccaggaggagattgactatgatgacaccatctctgtggagatgaagaaggaggactttgacatctacgacgaggacgagaaccagagccccaggagcttccagaagaagaccaggcactacttcattgctgctgtggagaggctgtgggactatggcatgagcagcagcccccatgtgctgaggaacagggcccagtctggctctgtgccccagttcaagaaggtggtgttccaggagttcactgatggcagcttcacccagcccctgtacagaggggagctgaatgagcacctgggcctgctgggcccctacatcagggctgaggtggaggacaacatcatggtgaccttcaggaaccaggccagcaggccctacagcttctacagcagcctgatcagctatgaggaggaccagaggcagggggctgagcccaggaagaactttgtgaagcccaatgaaaccaagacctacttctggaaggtgcagcaccacatggcccccaccaaggatgagtttgactgcaaggcctgggcctacttctctgatgtggacctggagaaggatgtgcactctggcctgattggccccctgctggtgtgccacaccaacaccctgaaccctgcccatggcaggcaggtgactgtgcaggagtttgccctgttcttcaccatctttgatgaaaccaagagctggtacttcactgagaacatggagaggaactgcagggccccctgcaacatccagatggaggaccccaccttcaaggagaactacaggttccatgccatcaatggctacatcatggacaccctgcctggcctggtgatggcccaggaccagaggatcaggtggtacctgctgagcatgggcagcaatgagaacatccacagcatccacttctctggccatgtgttcactgtgaggaagaaggaggagtacaagatggccctgtacaacctgtaccctggggtgtttgagactgtggagatgctgcccagcaaggctggcatctggagggtggagtgcctgattggggagcacctgcatgctggcatgagcaccctgttcctggtgtacagcaacaagtgccagacccccctgggcatggcctctggccacatcagggacttccagatcactgcctctggccagtatggccagtgggcccccaagctggccaggctgcactactctggcagcatcaatgcctggagcaccaaggagcccttcagctggatcaaggtggacctgctggcccccatgatcatccatggcatcaagacccagggggccaggcagaagttcagcagcctgtacatcagccagttcatcatcatgtacagcctggatggcaagaagtggcagacctacaggggcaacagcactggcaccctgatggtgttctttggcaatgtggacagctctggcatcaagcacaacatcttcaacccccccatcattgccagatacatcaggctgcaccccacccactacagcatcaggagcaccctgaggatggagctgatgggctgtgacctgaacagctgcagcatgcccctgggcatggagagcaaggccatctctgatgcccagatcactgccagcagctacttcaccaacatgtttgccacctggagccccagcaaggccaggctgcatctgcagggcaggagcaatgcctggaggccccaggtcaacaaccccaaggagtggctgcaggtggacttccagaagaccatgaaggtgactggggtgaccacccagggggtgaagagcctgctgaccagcatgtatgtgaaggagttcctgatcagcagcagccaggatggccaccagtggaccctgttcttccagaatggcaaggtgaaggtgttccagggcaaccaggacagcttcacccctgtggtgaacagcctggacccccccctgctgaccagatacctgaggattcacccccagagctgggtgcaccagattgccctgaggatggaggtgctgggctgtgaggcccaggacctgtactgaggatccaataaaatatctttattttcattacatctgtgtgttggttttttgtgtgttttcctgtaacgatcgggtctagagcatggctacgtagataagtagcatggcgggttaatcattaactacacctgcaggaggaacccctagtgatggagttggccactccctctctgcgcgctcgctcgctcactgaggccgggcgaccaaaggtcgcccgacgcccgggcggcctcagtgagcgagcgagcgcgcagctgcctgcaggggcgcgcctcgaggcatgcggtaccaagcttgtcgagaagtactagaggatcataatcagccataccacatttgtagaggttttacttgctttaaaaaacctcccacacctccccctgaacctgaaacataaaatgaatgcaattgttgttgttaacttgtttattgcagcttataatggttacaaataaagcaatagcatcacaaatttcacaaataaagcatttttttcactgcattctagttgtggtttgtccaaactcatcaatgtatcttatcatgtctggatctgatcactgatatcgcctaggagatccgaaccagataagtgaaatctagttccaaactattttgtcatttttaattttcgtattagcttacgacgctacacccagttcccatctattttgtcactcttccctaaataatccttaaaaactccatttccacccctcccagttcccaactattttgtccgcccacagcggggcatttttcttcctgttatgtttttaatcaaacatcctgccaactccatgtgacaaaccgtcatcttcggctactttttctctgtcacagaatgaaaatttttctgtcatctcttcgttattaatgtttgtaattgactgaatatcaacgcttatttgcagcctgaatggcgaatgggacgcgccctgtagcggcgcattaagcgcggcgggtgtggtggttacgcgcagcgtgaccgctacacttgccagcgccctagcgcccgctcctttcgctttcttcccttcctttctcgccacgttcgccggctttccccgtcaagctctaaatcgggggctccctttagggttccgatttagtgctttacggcacctcgaccccaaaaaacttgattagggtgatggttcacgtagtgggccatcgccctgatagacggtttttcgccctttgacgttggagtccacgttctttaatagtggactcttgttccaaactggaacaacactcaaccctatctcggtctattcttttgatttataagggattttgccgatttcggcctattggttaaaaaatgagctgatttaacaaaaatttaacgcgaattttaacaaaatattaacgtttacaatttcaggtggcacttttcggggaaatgtgcgcggaacccctatttgtttatttttctaaatacattcaaatatgtatccgctcatgagacaataaccctgataaatgcttcaataatattgaaaaaggaagagtatgagtattcaacatttccgtgtcgcccttattcccttttttgcggcattttgccttcctgtttttgctcacccagaaacgctggtgaaagtaaaagatgctgaagatcagttgggtgcacgagtgggttacatcgaactggatctcaacagcggtaagatccttgagagttttcgccccgaagaacgttttccaatgatgagcacttttaaagttctgctatgtggcgcggtattatcccgtattgacgccgggcaagagcaactcggtcgccgcatacactattctcagaatgacttggttgagtactcaccagtcacagaaaagcatcttacggatggcatgacagtaagagaattatgcagtgctgccataaccatgagtgataacactgcggccaacttacttctgacaacgatcggaggaccgaaggagctaaccgcttttttgcacaacatgggggatcatgtaactcgccttgatcgttgggaaccggagctgaatgaagccataccaaacgacgagcgtgacaccacgatgcctgtagcaatggcaacaacgttgcgcaaactattaactggcgaactacttactctagcttcccggcaacaattaatagactggatggaggcggataaagttgcaggaccacttctgcgctcggcccttccggctggctggtttattgctgataaatctggagccggtgagcgtgggtctcgcggtatcattgcagcactggggccagatggtaagccctcccgtatcgtagttatctacacgacggggagtcaggcaactatggatgaacgaaatagacagatcgctgagataggtgcctcactgattaagcattggtaactgtcagaccaagtttactcatatatactttagattgatttaaaacttcatttttaatttaaaaggatctaggtgaagatcctttttgataatctcatgaccaaaatcccttaacgtgagttttcgttccactgagcgtcagaccccgtagaaaagatcaaaggatcttcttgagatcctttttttctgcgcgtaatctgctgcttgcaaacaaaaaaaccaccgctaccagcggtggtttgtttgccggatcaagagctaccaactctttttccgaaggtaactggcttcagcagagcgcagataccaaatactgtccttctagtgtagccgtagttaggccaccacttcaagaactctgtagcaccgcctacatacctcgctctgctaatcctgttaccagtggctgctgccagtggcgataagtcgtgtcttaccgggttggactcaagacgatagttaccggataaggcgcagcggtcgggctgaacggggggttcgtgcacacagcccagcttggagcgaacgacctacaccgaactgagatacctacagcgtgagcattgagaaagcgccacgcttcccgaagggagaaaggcggacaggtatccggtaagcggcagggtcggaacaggagagcgcacgagggagcttccagggggaaacgcctggtatctttatagtcctgtcgggtttcgccacctctgacttgagcgtcgatttttgtgatgctcgtcaggggggcggagcctatggaaaaacgccagcaacgcggcctttttacggttcctggccttttgctggccttttgctcacatgttctttcctgcgttatcccctgattctgtggataaccgtattaccgcctttgagtgagctgataccgctcgccgcagccgaacgaccgagcgcagcgagtcagtgagcgaggaagcggaagagcgcctgatgcggtattttctccttacgcatctgtgcggtatttcacaccgcagaccagccgcgtaacctggcaaaatcggttacggttgagtaataaatggatgccctgcgtaagcgggtgtgggcggacaataaagtcttaaactgaacaaaatagatctaaactatgacaataaagtcttaaactagacagaatagttgtaaactgaaatcagtccagttatgctgtgaaaaagcatactggacttttgttatggctaaagcaaactcttcattttctgaagtgcaaattgcccgtcgtattaaagaggggcgtggccaagggcatggtaaagactatattcgcggcgttgtgacaatttaccgaacaactccgcggccgggaagccgatctcggcttgaacgaattgttaggtggcggtacttgggtcgatatcaaagtgcatcacttcttcccgtatgcccaactttgtatagagagccactgcgggatcgtcaccgtaatctgcttgcacgtagatcacataagcaccaagcgcgttggcctcatgcttgaggagattgatgagcgcggtggcaatgccctgcctccggtgctcgccggagactgcgagatcatagatatagatctcactacgcggctgctcaaacctgggcagaacgtaagccgcgagagcgccaacaaccgcttcttggtcgaaggcagcaagcgcgatgaatgtcttactacggagcaagttcccgaggtaatcggagtccggctgatgttgggagtaggtggctacgtctccgaactcacgaccgaaaagatcaagagcagcccgcatggatttgacttggtcagggccgagcctacatgtgcgaatgatgcccatacttgagccacctaactttgttttagggcgactgccctgctgcgtaacatcgttgctgctgcgtaacatcgttgctgctccataacatcaaacatcgacccacggcgtaacgcgcttgctgcttggatgcccgaggcatagactgtacaaaaaaacagtcataacaagccatgaaaaccgccactgcgccgttaccaccgctgcgttcggtcaaggttctggaccagttgcgtgagcgcatacgctacttgcattacagtttacgaaccgaacaggcttatgtcaactgggttcgtgccttcatccgtttccacggtgtgcgtcacccggcaaccttgggcagcagcgaagtcgaggcatttctgtcctggctggcgaacgagcgcaaggtttcggtctccacgcatcgtcaggcattggcggccttgctgttcttctacggcaaggtgctgtgcacggatctgccctggcttcaggagatcggaagacctcggccgtcgcggcgcttgccggtggtgctgaccccggatgaagtggttcgcatcctcggttttctggaaggcgagcatcgtttgttcgcccaggactctagctatagttctagtggttggctacgtatactccggaatattaatagatcatggagataattaaaatgataaccatctcgcaaataaataagtattttactgttttcgtaacagttttgtaataaaaaaacctataaatattccggattattcataccgtcccaccatcgggcgcggatctcggtccgaaaccatgtcgtactaccatcaccatcaccatcacgattacgatatcccaacgaccgaaaacctgtattttcagggcgccatgggatcc

SEQ ID NO: 206 - DNA, 11668 bp, synthetic construct
  misc_feature 1..11668: note = Description of Artificial Sequence: Synthetic polynucleotide
  source 1..11668: mol_type = other DNA
ggccggcccctgcaggcagctgcgcgctcgctcgctcactgaggccgcccgggcaaagcccgggcgtcgggcgacctttggtcgcccggcctcagtgagcgagcgagcgcgcagagagggagtggccaactccatcactaggggttccttgtagttaatgattaacccgccatgctacttatctacgtagccatgctctagaaggctcagaggcacacaggagtttctgggctcaccctgcccccttccaacccctcagttcccatcctccagcagctgtttgtgtgctgcctctgaagtccacactgaacaaacttcagcctactcatgtccctaaaatgggcaaacattgcaagcagcaaacagcaaacacacagccctccctgcctgctgaccttggagctggggcagaggtcagagacctctctgggcccatgccacctccaacatccactcgaccccttggaatttcggtggagaggagcagaggttgtcctggcgtggtttaggtagtgtgagagggtccgggttcaaaaccacttgctgggtggggagtcgtcagtaagtggctatgccccgaccccgaagcctgtttccccatctgtacaatggaaatgataaagacgcccatctgatagggtttttgtggcaaataaacatttggtttttttgttttgttttgttttgttttttgagatggaggtttgctctgtcgcccaggctggagtgcagtgacacaatctcatctcaccacaaccttcccctgcctcagcctcccaagtagctgggattacaagcatgtgccaccacacctggctaattttctatttttagtagagacgggtttctccatgttggtcagcctcagcctcccaagtaactgggattacaggcctgtgccaccacacccggctaattttttctatttttgacagggacggggtttcaccatgttggtcaggctggtctagaggtaccggatcttgctaccagtggaacagccactaaggattctgcagtgagagcagagggccagctaagtggtactctcccagagactgtctgactcacgccaccccctccaccttggacacaggacgctgtggtttctgagccaggtacaatgactcctttcggtaagtgcagtggaagctgtacactgcccaggcaaagcgtccgggcagcgtaggcgggcgactcagatcccagccagtggacttagcccctgtttgctcctccgataactggggtgaccttggttaatattcaccagcagcctcccccgttgcccctctggatccactgcttaaatacggacgaggacagggccctgtctcctcagcttcaggcaccaccactgacctgggacagtgaatccggactctaaggtaaatataaaatttttaagtgtataatgtgttaaactactgattctaattgtttctctcttttagattccaacctttggaactgagtttaaacgccgccaccatgcagatcgagctgtctacctgcttcttcctgtgcctgctgcggttctgcttcagcgccaccagaagatattacctgggcgccgtggaactgagctgggactacatgcagtctgacctgggagagctgcccgtggacgctagatttcctccaagagtgcccaagagcttccccttcaacacctccgtggtgtacaagaaaaccctgttcgtggaattcaccgaccacctgttcaatatcgccaagcctcggcctccttggatgggactgctgggacctacaattcaggccgaggtgtacgacaccgtggtcatcaccctgaagaacatggccagccatcctgtgtctctgcacgccgtgggagtgtcttattggaaggcttctgagggcgccgagtacgacgatcagacaagccagagagagaaagaggacgacaaggttttccctggcggcagccacacctatgtctggcaggtcctgaaagaaaacggccctatggcctccgatcctctgtgcctgacatacagctacctgagccacgtggacctggtcaaggacctgaattctggcctgatcggagccctgctcgtgtgtagagaaggcagcctggccaaagagaaaacccagacactgcacaagttcatcctgctgttcgccgtgttcgacgagggcaagagctggcacagcgagacaaagaacagcctgatgcaggacagggatgccgcctctgctagagcttggcctaagatgcacaccgtgaacggctacgtgaacagaagcctgcctggactgatcggctgccacagaaagtccgtgtactggcacgtgatcggcatgggcacaacacctgaggtgcacagcatctttctggaaggccacaccttcctcgtgcggaaccacagacaggccagcctggaaatcagccctatcaccttcctgaccgctcagaccctgctgatggatctgggccagtttctgctgttctgccacatcagctcccaccagcacgatggcatggaagcctacgtgaaggtggacagctgccccgaagaaccccagctgcggatgaagaacaacgaggaagccgaggactacgacgacgacctgaccgactctgagatggacgtcgtcagattcgacgacgataacagccccagcttcatccagatcagaagcgtggccaagaagcaccccaagacctgggtgcactatatcgccgccgaggaagaggactgggattacgctcctctggtgctggcccctgacgacagaagctacaagagccagtacctgaacaacggccctcagcggatcggccggaagtataagaaagtgcggttcatggcctacaccgacgagacattcaagaccagagaggccatccagcacgagagcggaattctgggccctctgctgtatggcgaagtgggcgatacactgctgatcatcttcaagaaccaggccagcagaccctacaacatctaccctcacggcatcaccgatgtgcggcccctgtattctagaaggctgcccaagggcgtgaagcacctgaaggacttccctatcctgcctggcgagattttcaagtacaagtggaccgtgaccgtggaagatggccccaccaagagcgaccctagatgtctgacacggtactacagcagcttcgtgaacatggaacgcgacctggccagcggcctgattggacctctgctgatctgctacaaagaaagcgtggaccagcggggcaaccagatcatgagcgacaagcggaacgtgatcctgtttagcgtgttcgatgagaaccggtcctggtatctgaccgagaacatccagcggtttctgcccaatcctgccggggtgcaactggaagatcctgagttccaggcaagcaacatcatgcactccatcaatggctatgtgttcgacagcctgcagctgagcgtgtgcctgcacgaagtggcctactggtacatcctgagcattggcgcccagaccgacttcctgtccgtgttctttagcggctacaccttcaagcacaagatggtgtacgaggataccctgacactgttcccattcagcggcgagacagtgttcatgagcatggaaaaccccggcctgtggattctgggctgtcacaacagcgacttccggaacagaggcatgacagccctgctgaaggtgtccagctgcgacaagaacaccggcgactactacgaggacagctatgaggacatcagcgcctacctgctgagcaagaacaatgccatcgagcctcggagcttcagccagaatcctcctgtgctgaagcggcaccagcgcgagatcaccagaacaaccctgcagagcgaccaagaggaaatcgattacgacgacaccatcagcgtcgagatgaagaaagaagatttcgacatctacgacgaggacgagaatcagagccccagaagctttcagaaaaagacccggcactacttcattgccgccgtcgagagactgtgggactacggcatgtctagcagccctcacgtgctgagaaatagagcccagagcggcagcgtgccccagttcaagaaagtggtgttccaagagttcaccgacggcagcttcacccagccactgtatagaggcgagctgaacgagcatctgggcctgctgggcccttatatcagagccgaagtggaagataacatcatggtcaccttccggaatcaggctagccggccttacagcttctacagctccctgatcagctacgaagaggaccagagacagggcgctgagcccagaaagaacttcgtgaagcccaacgagactaagacctacttttggaaggtgcagcaccacatggcccctacaaaggacgagttcgactgcaaagcctgggcctacttctccgatgtggatctggaaaaggacgtgcacagcgggctcatcggaccactgcttgtgtgccacaccaacacactgaaccccgctcacggcagacaagtgacagtgcaagagttcgccctgttcttcaccatcttcgacgaaacaaagagctggtacttcaccgagaatatggaacggaactgcagagccccttgcaacatccagatggaagatcccaccttcaaagagaactaccggttccacgccatcaacggctacatcatggacacactgcccggcctggttatggcccaggatcagagaatccggtggtatctgctgtccatgggctccaacgagaatatccacagcatccacttcagcggccacgtgttcaccgtgcggaaaaaagaagagtacaaaatggccctgtacaatctgtaccctggggtgttcgaaaccgtggaaatgctgccttccaaggccggcatttggagagtggaatgtctgattggagagcacctccacgccggaatgagcaccctgtttctggtgtacagcaacaagtgtcagacccctctcggcatggcctctggacacatcagagacttccagatcaccgcctctggccagtacggacagtgggctcctaaactggctcggctgcactacagcggcagcatcaatgcctggtccaccaaagagcccttcagctggatcaaggtggacctgctggctcccatgatcatccacggaatcaagacccagggcgccagacagaagttcagcagcctgtacatcagccagttcatcatcatgtacagcctggacggcaagaagtggcagacctacagaggcaacagcaccggcacactcatggtgttcttcggcaacgtggactccagcggcattaagcacaacatcttcaaccctccaatcattgcccggtacatccggctgcaccccacacactacagcatccggtctaccctgagaatggaactgatgggctgcgacctgaacagctgctctatgcccctcggaatggaaagcaaggccatcagcgacgcccagatcacagccagcagctacttcaccaacatgttcgccacttggagcccctccaaggctagactgcatctgcagggcagaagcaacgcttggaggccccaagtgaacaaccccaaagagtggctgcaggttgactttcaaaagaccatgaaagtgaccggcgtgaccacacagggcgtcaagtctctgctgacctctatgtacgtgaaagagttcctgatctccagcagccaggacggccatcagtggaccctgtttttccagaacggcaaagtgaaagtgttccagggcaatcaggacagcttcacacccgtggtcaattctctggaccctccactgctgaccagatacctgcggattcaccctcagtcttgggtgcaccagatcgctctgcggatggaagtgctgggctgtgaagctcaggacctctactagttaattaagagcatcttaccgccatttattcccatatttgttctgtttttcttgatttgggtatacatttaaatgttaataaaacaaaatggtggggcaatcatttacatttttagggatatgtaattactagttcaggtgtattgccacaagacaaacatgttaagaaactttcccgttatttacgctctgttcctgttaatcaacctctggattacaaaatttgtgaaagattgactgatattcttaactatgttgctccttttacgctgtgtggatatgctgctttatagcctctgtatctagctattgcttcccgtacggctttcgttttctcctccttgtataaatcctggttgctgtctcttttagaggagttgtggcccgttgtccgtcaacgtggcgtggtgtgctctgtgtttgctgacgcaacccccactggctggggcattgccaccacctgtcaactcctttctgggactttcgctttccccctcccgatcgccacggcagaactcatcgccgcctgccttgcccgctgctggacaggggctaggttgctgggcactgataattccgtggtgttgtctgtgccttctagttgccagccatctgttgtttgcccctcccccgtgccttccttgaccctggaaggtgccactcccactgtcctttcctaataaaatgaggaaattgcatcgcattgtctgagtaggtgtcattctattctggggggtggggtggggcaggacagcaagggggaggattgggaagacaatagcaggcatgctggggatgcggtgggctctatggctctagagcatggctacgtagataagtagcatggcgggttaatcattaactacacctgcaggaggaacccctagtgatggagttggccactccctctctgcgcgctcgctcgctcactgaggccgggcgaccaaaggtcgcccgacgcccgggcggcctcagtgagcgagcgagcgcgcagctgcctgcaggggcgcgcctcgaggcatgcggtaccaagcttgtcgagaagtactagaggatcataatcagccataccacatttgtagaggttttacttgctttaaaaaacctcccacacctccccctgaacctgaaacataaaatgaatgcaattgttgttgttaacttgtttattgcagcttataatggttacaaataaagcaatagcatcacaaatttcacaaataaagcatttttttcactgcattctagttgtggtttgtccaaactcatcaatgtatcttatcatgtctggatctgatcactgatatcgcctaggagatccgaaccagataagtgaaatctagttccaaactattttgtcatttttaattttcgtattagcttacgacgctacacccagttcccatctattttgtcactcttccctaaataatccttaaaaactccatttccacccctcccagttcccaactattttgtccgcccacagcggggcatttttcttcctgttatgtttttaatcaaacatcctgccaactccatgtgacaaaccgtcatcttcggctactttttctctgtcacagaatgaaaatttttctgtcatctcttcgttattaatgtttgtaattgactgaatatcaacgcttatttgcagcctgaatggcgaatgggacgcgccctgtagcggcgcattaagcgcggcgggtgtggtggttacgcgcagcgtgaccgctacacttgccagcgccctagcgcccgctcctttcgctttcttcccttcctttctcgccacgttcgccggctttccccgtcaagctctaaatcgggggctccctttagggttccgatttagtgctttacggcacctcgaccccaaaaaacttgattagggtgatggttcacgtagtgggccatcgccctgatagacggtttttcgccctttgacgttggagtccacgttctttaatagtggactcttgttccaaactggaacaacactcaaccctatctcggtctattcttttgatttataagggattttgccgatttcggcctattggttaaaaaatgagctgatttaacaaaaatttaacgcgaattttaacaaaatattaacgtttacaatttcaggtggcacttttcggggaaatgtgcgcggaacccctatttgtttatttttctaaatacattcaaatatgtatccgctcatgagacaataaccctgataaatgcttcaataatattgaaaaaggaagagtatgagtattcaacatttccgtgtcgcccttattcccttttttgcggcattttgccttcctgtttttgctcacccagaaacgctggtgaaagtaaaagatgctgaagatcagttgggtgcacgagtgggttacatcgaactggatctcaacagcggtaagatccttgagagttttcgccccgaagaacgttttccaatgatgagcacttttaaagttctgctatgtggcgcggtattatcccgtattgacgccgggcaagagcaactcggtcgccgcatacactattctcagaatgacttggttgagtactcaccagtcacagaaaagcatcttacggatggcatgacagtaagagaattatgcagtgctgccataaccatgagtgataacactgcggccaacttacttctgacaacgatcggaggaccgaaggagctaaccgcttttttgcacaacatgggggatcatgtaactcgccttgatcgttgggaaccggagctgaatgaagccataccaaacgacgagcgtgacaccacgatgcctgtagcaatggcaacaacgttgcgcaaactattaactggcgaactacttactctagcttcccggcaacaattaatagactggatggaggcggataaagttgcaggaccacttctgcgctcggcccttccggctggctggtttattgctgataaatctggagccggtgagcgtgggtctcgcggtatcattgcagcactggggccagatggtaagccctcccgtatcgtagttatctacacgacggggagtcaggcaactatggatgaacgaaatagacagatcgctgagataggtgcctcactgattaagcattggtaactgtcagaccaagtttactcatatatactttagattgatttaaaacttcatttttaatttaaaaggatctaggtgaagatcctttttgataatctcatgaccaaaatcccttaacgtgagttttcgttccactgagcgtcagaccccgtagaaaagatcaaaggatcttcttgagatcctttttttctgcgcgtaatctgctgcttgcaaacaaaaaaaccaccgctaccagcggtggtttgtttgccggatcaagagctaccaactctttttccgaaggtaactggcttcagcagagcgcagataccaaatactgtccttctagtgtagccgtagttaggccaccacttcaagaactctgtagcaccgcctacatacctcgctctgctaatcctgttaccagtggctgctgccagtggcgataagtcgtgtcttaccgggttggactcaagacgatagttaccggataaggcgcagcggtcgggctgaacggggggttcgtgcacacagcccagcttggagcgaacgacctacaccgaactgagatacctacagcgtgagcattgagaaagcgccacgcttcccgaagggagaaaggcggacaggtatccggtaagcggcagggtcggaacaggagagcgcacgagggagcttccagggggaaacgcctggtatctttatagtcctgtcgggtttcgccacctctgacttgagcgtcgatttttgtgatgctcgtcaggggggcggagcctatggaaaaacgccagcaacgcggcctttttacggttcctggccttttgctggccttttgctcacatgttctttcctgcgttatcccctgattctgtggataaccgtattaccgcctttgagtgagctgataccgctcgccgcagccgaacgaccgagcgcagcgagtcagtgagcgaggaagcggaagagcgcctgatgcggtattttctccttacgcatctgtgcggtatttcacaccgcagaccagccgcgtaacctggcaaaatcggttacggttgagtaataaatggatgccctgcgtaagcgggtgtgggcggacaataaagtcttaaactgaacaaaatagatctaaactatgacaataaagtcttaaactagacagaatagttgtaaactgaaatcagtccagttatgctgtgaaaaagcatactggacttttgttatggctaaagcaaactcttcattttctgaagtgcaaattgcccgtcgtattaaagaggggcgtggccaagggcatggtaaagactatattcgcggcgttgtgacaatttaccgaacaactccgcggccgggaagccgatctcggcttgaacgaattgttaggtggcggtacttgggtcgatatcaaagtgcatcacttcttcccgtatgcccaactttgtatagagagccactgcgggatcgtcaccgtaatctgcttgcacgtagatcacataagcaccaagcgcgttggcctcatgcttgaggagattgatgagcgcggtggcaatgccctgcctccggtgctcgccggagactgcgagatcatagatatagatctcactacgcggctgctcaaacctgggcagaacgtaagccgcgagagcgccaacaaccgcttcttggtcgaaggcagcaagcgcgatgaatgtcttactacggagcaagttcccgaggtaatcggagtccggctgatgttgggagtaggtggctacgtctccgaactcacgaccgaaaagatcaagagcagcccgcatggatttgacttggtcagggccgagcctacatgtgcgaatgatgcccatacttgagccacctaactttgttttagggcgactgccctgctgcgtaacatcgttgctgctgcgtaacatcgttgctgctccataacatcaaacatcgacccacggcgtaacgcgcttgctgcttggatgcccgaggcatagactgtacaaaaaaacagtcataacaagccatgaaaaccgccactgcgccgttaccaccgctgcgttcggtcaaggttctggaccagttgcgtgagcgcatacgctacttgcattacagtttacgaaccgaacaggcttatgtcaactgggttcgtgccttcatccgtttccacggtgtgcgtcacccggcaaccttgggcagcagcgaagtcgaggcatttctgtcctggctggcgaacgagcgcaaggtttcggtctccacgcatcgtcaggcattggcggccttgctgttcttctacggcaaggtgctgtgcacggatctgccctggcttcaggagatcggaagacctcggccgtcgcggcgcttgccggtggtgctgaccccggatgaagtggttcgcatcctcggttttctggaaggcgagcatcgtttgttcgcccaggactctagctatagttctagtggttggctacgtatactccggaatattaatagatcatggagataattaaaatgataaccatctcgcaaataaataagtattttactgttttcgtaacagttttgtaataaaaaaacctataaatattccggattattcataccgtcccaccatcgggcgcggatctcggtccgaaaccatgtcgtactaccatcaccatcaccatcacgattacgatatcccaacgaccgaaaacctgtattttcagggcgccatgggatcc

SEQ ID NO: 207 - DNA, 11719 bp, synthetic construct
  misc_feature 1..11719: note = Description of Artificial Sequence: Synthetic polynucleotide
  source 1..11719: mol_type = other DNA
ggccggcccctgcaggcagctgcgcgctcgctcgctcactgaggccgcccgggcaaagcccgggcgtcgggcgacctttggtcgcccggcctcagtgagcgagcgagcgcgcagagagggagtggccaactccatcactaggggttccttgtagttaatgattaacccgccatgctacttatctacgtagccatgctctagaaggctcagaggcacacaggagtttctgggctcaccctgcccccttccaacccctcagttcccatcctccagcagctgtttgtgtgctgcctctgaagtccacactgaacaaacttcagcctactcatgtccctaaaatgggcaaacattgcaagcagcaaacagcaaacacacagccctccctgcctgctgaccttggagctggggcagaggtcagagacctctctgggcccatgccacctccaacatccactcgaccccttggaatttcggtggagaggagcagaggttgtcctggcgtggtttaggtagtgtgagagggtccgggttcaaaaccacttgctgggtggggagtcgtcagtaagtggctatgccccgaccccgaagcctgtttccccatctgtacaatggaaatgataaagacgcccatctgatagggtttttgtggcaaataaacatttggtttttttgttttgttttgttttgttttttgagatggaggtttgctctgtcgcccaggctggagtgcagtgacacaatctcatctcaccacaaccttcccctgcctcagcctcccaagtagctgggattacaagcatgtgccaccacacctggctaattttctatttttagtagagacgggtttctccatgttggtcagcctcagcctcccaagtaactgggattacaggcctgtgccaccacacccggctaattttttctatttttgacagggacggggtttcaccatgttggtcaggctggtctagaggtaccggatcttgctaccagtggaacagccactaaggattctgcagtgagagcagagggccagctaagtggtactctcccagagactgtctgactcacgccaccccctccaccttggacacaggacgctgtggtttctgagccaggtacaatgactcctttcggtaagtgcagtggaagctgtacactgcccaggcaaagcgtccgggcagcgtaggcgggcgactcagatcccagccagtggacttagcccctgtttgctcctccgataactggggtgaccttggttaatattcaccagcagcctcccccgttgcccctctggatccactgcttaaatacggacgaggacagggccctgtctcctcagcttcaggcaccaccactgacctgggacagtgaatccggactctaaggtaaatataaaatttttaagtgtataatgtgttaaactactgattctaattgtttctctcttttagattccaacctttggaactgagtttaaacgccgccaccatgcagattgagctgagcacctgcttcttcctgtgcctgctgaggttctgcttctctgccaccaggagatactacctgggggctgtggagctgagctgggactacatgcagtctgacctgggggagctgcctgtggatgccaggttcccccccagagtgcccaagagcttccccttcaacacctctgtggtgtacaagaagaccctgtttgtggagttcactgaccacctgttcaacattgccaagcccaggcccccctggatgggcctgctgggccccaccatccaggctgaggtgtatgacactgtggtgatcaccctgaagaacatggccagccaccctgtgagcctgcatgctgtgggggtgagctactggaaggcctctgagggggctgagtatgatgaccagaccagccagagggagaaggaggatgacaaggtgttccctgggggcagccacacctatgtgtggcaggtgctgaaggagaatggccccatggcctctgaccccctgtgcctgacctacagctacctgagccatgtggacctggtgaaggacctgaactctggcctgattggggccctgctggtgtgcagggagggcagcctggccaaggagaagacccagaccctgcacaagttcatcctgctgtttgctgtgtttgatgagggcaagagctggcactctgaaaccaagaacagcctgatgcaggacagggatgctgcctctgccagggcctggcccaagatgcacactgtgaatggctatgtgaacaggagcctgcctggcctgattggctgccacaggaagtctgtgtactggcatgtgattggcatgggcaccacccctgaggtgcacagcatcttcctggagggccacaccttcctggtcaggaaccacaggcaggccagcctggagatcagccccatcaccttcctgactgcccagaccctgctgatggacctgggccagttcctgctgttctgccacatcagcagccaccagcatgatggcatggaggcctatgtgaaggtggacagctgccctgaggagccccagctgaggatgaagaacaatgaggaggctgaggactatgatgatgacctgactgactctgagatggatgtggtgaggtttgatgatgacaacagccccagcttcatccagatcaggtctgtggccaagaagcaccccaagacctgggtgcactacattgctgctgaggaggaggactgggactatgcccccctggtgctggcccctgatgacaggagctacaagagccagtacctgaacaatggcccccagaggattggcaggaagtacaagaaggtcaggttcatggcctacactgatgaaaccttcaagaccagggaggccatccagcatgagtctggcatcctgggccccctgctgtatggggaggtgggggacaccctgctgatcatcttcaagaaccaggccagcaggccctacaacatctacccccatggcatcactgatgtgaggcccctgtacagcaggaggctgcccaagggggtgaagcacctgaaggacttccccatcctgcctggggagatcttcaagtacaagtggactgtgactgtggaggatggccccaccaagtctgaccccaggtgcctgaccagatactacagcagctttgtgaacatggagagggacctggcctctggcctgattggccccctgctgatctgctacaaggagtctgtggaccagaggggcaaccagatcatgtctgacaagaggaatgtgatcctgttctctgtgtttgatgagaacaggagctggtacctgactgagaacatccagaggttcctgcccaaccctgctggggtgcagctggaggaccctgagttccaggccagcaacatcatgcacagcatcaatggctatgtgtttgacagcctgcagctgtctgtgtgcctgcatgaggtggcctactggtacatcctgagcattggggcccagactgacttcctgtctgtgttcttctctggctacaccttcaagcacaagatggtgtatgaggacaccctgaccctgttccccttctctggggagactgtgttcatgagcatggagaaccctggcctgtggattctgggctgccacaactctgacttcaggaacaggggcatgactgccctgctgaaagtctccagctgtgacaagaacactggggactactatgaggacagctatgaggacatctctgcctacctgctgagcaagaacaatgccattgagcccaggagcttcagccagaatgccactaatgtgtctaacaacagcaacaccagcaatgacagcaatgtgtctcccccagtgctgaagaggcaccagagggagatcaccaggaccaccctgcagtctgaccaggaggagattgactatgatgacaccatctctgtggagatgaagaaggaggactttgacatctacgacgaggacgagaaccagagccccaggagcttccagaagaagaccaggcactacttcattgctgctgtggagaggctgtgggactatggcatgagcagcagcccccatgtgctgaggaacagggcccagtctggctctgtgccccagttcaagaaggtggtgttccaggagttcactgatggcagcttcacccagcccctgtacagaggggagctgaatgagcacctgggcctgctgggcccctacatcagggctgaggtggaggacaacatcatggtgaccttcaggaaccaggccagcaggccctacagcttctacagcagcctgatcagctatgaggaggaccagaggcagggggctgagcccaggaagaactttgtgaagcccaatgaaaccaagacctacttctggaaggtgcagcaccacatggcccccaccaaggatgagtttgactgcaaggcctgggcctacttctctgatgtggacctggagaaggatgtgcactctggcctgattggccccctgctggtgtgccacaccaacaccctgaaccctgcccatggcaggcaggtgactgtgcaggagtttgccctgttcttcaccatctttgatgaaaccaagagctggtacttcactgagaacatggagaggaactgcagggccccctgcaacatccagatggaggaccccaccttcaaggagaactacaggttccatgccatcaatggctacatcatggacaccctgcctggcctggtgatggcccaggaccagaggatcaggtggtacctgctgagcatgggcagcaatgagaacatccacagcatccacttctctggccatgtgttcactgtgaggaagaaggaggagtacaagatggccctgtacaacctgtaccctggggtgtttgagactgtggagatgctgcccagcaaggctggcatctggagggtggagtgcctgattggggagcacctgcatgctggcatgagcaccctgttcctggtgtacagcaacaagtgccagacccccctgggcatggcctctggccacatcagggacttccagatcactgcctctggccagtatggccagtgggcccccaagctggccaggctgcactactctggcagcatcaatgcctggagcaccaaggagcccttcagctggatcaaggtggacctgctggcccccatgatcatccatggcatcaagacccagggggccaggcagaagttcagcagcctgtacatcagccagttcatcatcatgtacagcctggatggcaagaagtggcagacctacaggggcaacagcactggcaccctgatggtgttctttggcaatgtggacagctctggcatcaagcacaacatcttcaacccccccatcattgccagatacatcaggctgcaccccacccactacagcatcaggagcaccctgaggatggagctgatgggctgtgacctgaacagctgcagcatgcccctgggcatggagagcaaggccatctctgatgcccagatcactgccagcagctacttcaccaacatgtttgccacctggagccccagcaaggccaggctgcacctgcagggcaggagcaatgcctggaggccccaggtcaacaaccccaaggagtggctgcaggtggacttccagaagaccatgaaggtgactggggtgaccacccagggggtgaagagcctgctgaccagcatgtatgtgaaggagttcctgatcagcagcagccaggatggccaccagtggaccctgttcttccagaatggcaaggtgaaggtgttccagggcaaccaggacagcttcacccctgtggtgaacagcctggacccccccctgctgaccagatacctgaggattcacccccagagctgggtgcaccagattgccctgaggatggaggtgctgggctgtgaggcccaggacctgtactgattaattaagagcatcttaccgccatttattcccatatttgttctgtttttcttgatttgggtatacatttaaatgttaataaaacaaaatggtggggcaatcatttacatttttagggatatgtaattactagttcaggtgtattgccacaagacaaacatgttaagaaactttcccgttatttacgctctgttcctgttaatcaacctctggattacaaaatttgtgaaagattgactgatattcttaactatgttgctccttttacgctgtgtggatatgctgctttatagcctctgtatctagctattgcttcccgtacggctttcgttttctcctccttgtataaatcctggttgctgtctcttttagaggagttgtggcccgttgtccgtcaacgtggcgtggtgtgctctgtgtttgctgacgcaacccccactggctggggcattgccaccacctgtcaactcctttctgggactttcgctttccccctcccgatcgccacggcagaactcatcgccgcctgccttgcccgctgctggacaggggctaggttgctgggcactgataattccgtggtgttgtctgtgccttctagttgccagccatctgttgtttgcccctcccccgtgccttccttgaccctggaaggtgccactcccactgtcctttcctaataaaatgaggaaattgcatcgcattgtctgagtaggtgtcattctattctggggggtggggtggggcaggacagcaagggggaggattgggaagacaatagcaggcatgctggggatgcggtgggctctatggctctagagcatggctacgtagataagtagcatggcgggttaatcattaactacacctgcaggaggaacccctagtgatggagttggccactccctctctgcgcgctcgctcgctcactgaggccgggcgaccaaaggtcgcccgacgcccgggcggcctcagtgagcgagcgagcgcgcagctgcctgcaggggcgcgcctcgaggcatgcggtaccaagcttgtcgagaagtactagaggatcataatcagccataccacatttgtagaggttttacttgctttaaaaaacctcccacacctccccctgaacctgaaacataaaatgaatgcaattgttgttgttaacttgtttattgcagcttataatggttacaaataaagcaatagcatcacaaatttcacaaataaagcatttttttcactgcattctagttgtggtttgtccaaactcatcaatgtatcttatcatgtctggatctgatcactgatatcgcctaggagatccgaaccagataagtgaaatctagttccaaactattttgtcatttttaattttcgtattagcttacgacgctacacccagttcccatctattttgtcactcttccctaaataatccttaaaaactccatttccacccctcccagttcccaactattttgtccgcccacagcggggcatttttcttcctgttatgtttttaatcaaacatcctgccaactccatgtgacaaaccgtcatcttcggctactttttctctgtcacagaatgaaaatttttctgtcatctcttcgttattaatgtttgtaattgactgaatatcaacgcttatttgcagcctgaatggcgaatgggacgcgccctgtagcggcgcattaagcgcggcgggtgtggtggttacgcgcagcgtgaccgctacacttgccagcgccctagcgcccgctcctttcgctttcttcccttcctttctcgccacgttcgccggctttccccgtcaagctctaaatcgggggctccctttagggttccgatttagtgctttacggcacctcgaccccaaaaaacttgattagggtgatggttcacgtagtgggccatcgccctgatagacggtttttcgccctttgacgttggagtccacgttctttaatagtggactcttgttccaaactggaacaacactcaaccctatctcggtctattcttttgatttataagggattttgccgatttcggcctattggttaaaaaatgagctgatttaacaaaaatttaacgcgaattttaacaaaatattaacgtttacaatttcaggtggcacttttcggggaaatgtgcgcggaacccctatttgtttatttttctaaatacattcaaatatgtatccgctcatgagacaataaccctgataaatgcttcaataatattgaaaaaggaagagtatgagtattcaacatttccgtgtcgcccttattcccttttttgcggcattttgccttcctgtttttgctcacccagaaacgctggtgaaagtaaaagatgctgaagatcagttgggtgcacgagtgggttacatcgaactggatctcaacagcggtaagatccttgagagttttcgccccgaagaacgttttccaatgatgagcacttttaaagttctgctatgtggcgcggtattatcccgtattgacgccgggcaagagcaactcggtcgccgcatacactattctcagaatgacttggttgagtactcaccagtcacagaaaagcatcttacggatggcatgacagtaagagaattatgcagtgctgccataaccatgagtgataacactgcggccaacttacttctgacaacgatcggaggaccgaaggagctaaccgcttttttgcacaacatgggggatcatgtaactcgccttgatcgttgggaaccggagctgaatgaagccataccaaacgacgagcgtgacaccacgatgcctgtagcaatggcaacaacgttgcgcaaactattaactggcgaactacttactctagcttcccggcaacaattaatagactggatggaggcggataaagttgcaggaccacttctgcgctcggcccttccggctggctggtttattgctgataaatctggagccggtgagcgtgggtctcgcggtatcattgcagcactggggccagatggtaagccctcccgtatcgtagttatctacacgacggggagtcaggcaactatggatgaacgaaatagacagatcgctgagataggtgcctcactgattaagcattggtaactgtcagaccaagtttactcatatatactttagattgatttaaaacttcatttttaatttaaaaggatctaggtgaagatcctttttgataatctcatgaccaaaatcccttaacgtgagttttcgttccactgagcgtcagaccccgtagaaaagatcaaaggatcttcttgagatcctttttttctgcgcgtaatctgctgcttgcaaacaaaaaaaccaccgctaccagcggtggtttgtttgccggatcaagagctaccaactctttttccgaaggtaactggcttcagcagagcgcagataccaaatactgtccttctagtgtagccgtagttaggccaccacttcaagaactctgtagcaccgcctacatacctcgctctgctaatcctgttaccagtggctgctgccagtggcgataagtcgtgtcttaccgggttggactcaagacgatagttaccggataaggcgcagcggtcgggctgaacggggggttcgtgcacacagcccagcttggagcgaacgacctacaccgaactgagatacctacagcgtgagcattgagaaagcgccacgcttcccgaagggagaaaggcggacaggtatccggtaagcggcagggtcggaacaggagagcgcacgagggagcttccagggggaaacgcctggtatctttatagtcctgtcgggtttcgccacctctgacttgagcgtcgatttttgtgatgctcgtcaggggggcggagcctatggaaaaacgccagcaacgcggcctttttacggttcctggccttttgctggccttttgctcacatgttctttcctgcgttatcccctgattctgtggataaccgtattaccgcctttgagtgagctgataccgctcgccgcagccgaacgaccgagcgcagcgagtcagtgagcgaggaagcggaagagcgcctgatgcggtattttctccttacgcatctgtgcggtatttcacaccgcagaccagccgcgtaacctggcaaaatcggttacggttgagtaataaatggatgccctgcgtaagcgggtgtgggcggacaataaagtcttaaactgaacaaaatagatctaaactatgacaataaagtcttaaactagacagaatagttgtaaactgaaatcagtccagttatgctgtgaaaaagcatactggacttttgttatggctaaagcaaactcttcattttctgaagtgcaaattgcccgtcgtattaaagaggggcgtggccaagggcatggtaaagactatattcgcggcgttgtgacaatttaccgaacaactccgcggccgggaagccgatctcggcttgaacgaattgttaggtggcggtacttgggtcgatatcaaagtgcatcacttcttcccgtatgcccaactttgtatagagagccactgcgggatcgtcaccgtaatctgcttgcacgtagatcacataagcaccaagcgcgttggcctcatgcttgaggagattgatgagcgcggtggcaatgccctgcctccggtgctcgccggagactgcgagatcatagatatagatctcactacgcggctgctcaaacctgggcagaacgtaagccgcgagagcgccaacaaccgcttcttggtcgaaggcagcaagcgcgatgaatgtcttactacggagcaagttcccgaggtaatcggagtccggctgatgttgggagtaggtggctacgtctccgaactcacgaccgaaaagatcaagagcagcccgcatggatttgacttggtcagggccgagcctacatgtgcgaatgatgcccatacttgagccacctaactttgttttagggcgactgccctgctgcgtaacatcgttgctgctgcgtaacatcgttgctgctccataacatcaaacatcgacccacggcgtaacgcgcttgctgcttggatgcccgaggcatagactgtacaaaaaaacagtcataacaagccatgaaaaccgccactgcgccgttaccaccgctgcgttcggtcaaggttctggaccagttgcgtgagcgcatacgctacttgcattacagtttacgaaccgaacaggcttatgtcaactgggttcgtgccttcatccgtttccacggtgtgcgtcacccggcaaccttgggcagcagcgaagtcgaggcatttctgtcctggctggcgaacgagcgcaaggtttcggtctccacgcatcgtcaggcattggcggccttgctgttcttctacggcaaggtgctgtgcacggatctgccctggcttcaggagatcggaagacctcggccgtcgcggcgcttgccggtggtgctgaccccggatgaagtggttcgcatcctcggttttctggaaggcgagcatcgtttgttcgcccaggactctagctatagttctagtggttggctacgtatactccggaatattaatagatcatggagataattaaaatgataaccatctcgcaaataaataagtattttactgttttcgtaacagttttgtaataaaaaaacctataaatattccggattattcataccgtcccaccatcgggcgcggatctcggtccgaaaccatgtcgtactaccatcaccatcaccatcacgattacgatatcccaacgaccgaaaacctgtattttcagggcgccatgggatcc

SEQ ID NO: 208 - DNA, 11796 bp, synthetic construct
  misc_feature 1..11796: note = Description of Artificial Sequence: Synthetic polynucleotide
  source 1..11796: mol_type = other DNA
ggccggcccctgcaggcagctgcgcgctcgctcgctcactgaggccgcccgggcaaagcccgggcgtcgggcgacctttggtcgcccggcctcagtgagcgagcgagcgcgcagagagggagtggccaactccatcactaggggttccttgtagttaatgattaacccgccatgctacttatctacgtagccatgctctagaaggctcagaggcacacaggagtttctgggctcaccctgcccccttccaacccctcagttcccatcctccagcagctgtttgtgtgctgcctctgaagtccacactgaacaaacttcagcctactcatgtccctaaaatgggcaaacattgcaagcagcaaacagcaaacacacagccctccctgcctgctgaccttggagctggggcagaggtcagagacctctctgggcccatgccacctccaacatccactcgaccccttggaatttcggtggagaggagcagaggttgtcctggcgtggtttaggtagtgtgagagggtccgggttcaaaaccacttgctgggtggggagtcgtcagtaagtggctatgccccgaccccgaagcctgtttccccatctgtacaatggaaatgataaagacgcccatctgatagggtttttgtggcaaataaacatttggtttttttgttttgttttgttttgttttttgagatggaggtttgctctgtcgcccaggctggagtgcagtgacacaatctcatctcaccacaaccttcccctgcctcagcctcccaagtagctgggattacaagcatgtgccaccacacctggctaattttctatttttagtagagacgggtttctccatgttggtcagcctcagcctcccaagtaactgggattacaggcctgtgccaccacacccggctaattttttctatttttgacagggacggggtttcaccatgttggtcaggctggtctagaggtaccggatcttgctaccagtggaacagccactaaggattctgcagtgagagcagagggccagctaagtggtactctcccagagactgtctgactcacgccaccccctccaccttggacacaggacgctgtggtttctgagccaggtacaatgactcctttcggtaagtgcagtggaagctgtacactgcccaggcaaagcgtccgggcagcgtaggcgggcgactcagatcccagccagtggacttagcccctgtttgctcctccgataactggggtgaccttggttaatattcaccagcagcctcccccgttgcccctctggatccactgcttaaatacggacgaggacagggccctgtctcctcagcttcaggcaccaccactgacctgggacagtgaatccggactctaaggtaaatataaaatttttaagtgtataatgtgttaaactactgattctaattgtttctctcttttagattccaacctttggaactgagtttaaacgccgccaccatgcagattgagctgagcacctgcttcttcctgtgcctgctgaggttctgcttctctgccaccaggagatactacctgggggctgtggagctgagctgggactacatgcagtctgacctgggggagctgcctgtggatgccaggttcccccccagagtgcccaagagcttccccttcaacacctctgtggtgtacaagaagaccctgtttgtggagttcactgaccacctgttcaacattgccaagcccaggcccccctggatgggcctgctgggccccaccatccaggctgaggtgtatgacactgtggtgatcaccctgaagaacatggccagccaccctgtgagcctgcatgctgtgggggtgagctactggaaggcctctgagggggctgagtatgatgaccagaccagccagagggagaaggaggatgacaaggtgttccctgggggcagccacacctatgtgtggcaggtgctgaaggagaatggccccatggcctctgaccccctgtgcctgacctacagctacctgagccatgtggacctggtgaaggacctgaactctggcctgattggggccctgctggtgtgcagggagggcagcctggccaaggagaagacccagaccctgcacaagttcatcctgctgtttgctgtgtttgatgagggcaagagctggcactctgaaaccaagaacagcctgatgcaggacagggatgctgcctctgccagggcctggcccaagatgcacactgtgaatggctatgtgaacaggagcctgcctggcctgattggctgccacaggaagtctgtgtactggcatgtgattggcatgggcaccacccctgaggtgcacagcatcttcctggagggccacaccttcctggtcaggaaccacaggcaggccagcctggagatcagccccatcaccttcctgactgcccagaccctgctgatggacctgggccagttcctgctgttctgccacatcagcagccaccagcatgatggcatggaggcctatgtgaaggtggacagctgccctgaggagccccagctgaggatgaagaacaatgaggaggctgaggactatgatgatgacctgactgactctgagatggatgtggtgaggtttgatgatgacaacagccccagcttcatccagatcaggtctgtggccaagaagcaccccaagacctgggtgcactacattgctgctgaggaggaggactgggactatgcccccctggtgctggcccctgatgacaggagctacaagagccagtacctgaacaatggcccccagaggattggcaggaagtacaagaaggtcaggttcatggcctacactgatgaaaccttcaagaccagggaggccatccagcatgagtctggcatcctgggccccctgctgtatggggaggtgggggacaccctgctgatcatcttcaagaaccaggccagcaggccctacaacatctacccccatggcatcactgatgtgaggcccctgtacagcaggaggctgcccaagggggtgaagcacctgaaggacttccccatcctgcctggggagatcttcaagtacaagtggactgtgactgtggaggatggccccaccaagtctgaccccaggtgcctgaccagatactacagcagctttgtgaacatggagagggacctggcctctggcctgattggccccctgctgatctgctacaaggagtctgtggaccagaggggcaaccagatcatgtctgacaagaggaatgtgatcctgttctctgtgtttgatgagaacaggagctggtacctgactgagaacatccagaggttcctgcccaaccctgctggggtgcagctggaggaccctgagttccaggccagcaacatcatgcacagcatcaatggctatgtgtttgacagcctgcagctgtctgtgtgcctgcatgaggtggcctactggtacatcctgagcattggggcccagactgacttcctgtctgtgttcttctctggctacaccttcaagcacaagatggtgtatgaggacaccctgaccctgttccccttctctggggagactgtgttcatgagcatggagaaccctggcctgtggattctgggctgccacaactctgacttcaggaacaggggcatgactgccctgctgaaagtctccagctgtgacaagaacactggggactactatgaggacagctatgaggacatctctgcctacctgctgagcaagaacaatgccattgagcccaggagcttcagccagaatgccactaatgtgtctaacaacagcaacaccagcaatgacagcaatgtgtctcccccagtgctgaagaggcaccagagggagatcaccaggaccaccctgcagtctgaccaggaggagattgactatgatgacaccatctctgtggagatgaagaaggaggactttgacatctacgacgaggacgagaaccagagccccaggagcttccagaagaagaccaggcactacttcattgctgctgtggagaggctgtgggactatggcatgagcagcagcccccatgtgctgaggaacagggcccagtctggctctgtgccccagttcaagaaggtggtgttccaggagttcactgatggcagcttcacccagcccctgtacagaggggagctgaatgagcacctgggcctgctgggcccctacatcagggctgaggtggaggacaacatcatggtgaccttcaggaaccaggccagcaggccctacagcttctacagcagcctgatcagctatgaggaggaccagaggcagggggctgagcccaggaagaactttgtgaagcccaatgaaaccaagacctacttctggaaggtgcagcaccacatggcccccaccaaggatgagtttgactgcaaggcctgggcctacttctctgatgtggacctggagaaggatgtgcactctggcctgattggccccctgctggtgtgccacaccaacaccctgaaccctgcccatggcaggcaggtgactgtgcaggagtttgccctgttcttcaccatctttgatgaaaccaagagctggtacttcactgagaacatggagaggaactgcagggccccctgcaacatccagatggaggaccccaccttcaaggagaactacaggttccatgccatcaatggctacatcatggacaccctgcctggcctggtgatggcccaggaccagaggatcaggtggtacctgctgagcatgggcagcaatgagaacatccacagcatccacttctctggccatgtgttcactgtgaggaagaaggaggagtacaagatggccctgtacaacctgtaccctggggtgtttgagactgtggagatgctgcccagcaaggctggcatctggagggtggagtgcctgattggggagcacctgcatgctggcatgagcaccctgttcctggtgtacagcaacaagtgccagacccccctgggcatggcctctggccacatcagggacttccagatcactgcctctggccagtatggccagtgggcccccaagctggccaggctgcactactctggcagcatcaatgcctggagcaccaaggagcccttcagctggatcaaggtggacctgctggcccccatgatcatccatggcatcaagacccagggggccaggcagaagttcagcagcctgtacatcagccagttcatcatcatgtacagcctggatggcaagaagtggcagacctacaggggcaacagcactggcaccctgatggtgttctttggcaatgtggacagctctggcatcaagcacaacatcttcaacccccccatcattgccagatacatcaggctgcaccccacccactacagcatcaggagcaccctgaggatggagctgatgggctgtgacctgaacagctgcagcatgcccctgggcatggagagcaaggccatctctgatgcccagatcactgccagcagctacttcaccaacatgtttgccacctggagccccagcaaggccaggctgcacctgcagggcaggagcaatgcctggaggccccaggtcaacaaccccaaggagtggctgcaggtggacttccagaagaccatgaaggtgactggggtgaccacccagggggtgaagagcctgctgaccagcatgtatgtgaaggagttcctgatcagcagcagccaggatggccaccagtggaccctgttcttccagaatggcaaggtgaaggtgttccagggcaaccaggacagcttcacccctgtggtgaacagcctggacccccccctgctgaccagatacctgaggattcacccccagagctgggtgcaccagattgccctgaggatggaggtgctgggctgtgaggcccaggacctgtactgattaattaagagcatcttaccgccatttattcccatatttgttctgtttttcttgatttgggtatacatttaaatgttaataaaacaaaatggtggggcaatcatttacatttttagggatatgtaattactagttcaggtgtattgccacaagacaaacatgttaagaaactttcccgttatttacgctctgttcctgttaatcaacctctggattacaaaatttgtgaaagattgactgatattcttaactatgttgctccttttacgctgtgtggatatgctgctttatagcctctgtatctagctattgcttcccgtacggctttcgttttctcctccttgtataaatcctggttgctgtctcttttagaggagttgtggcccgttgtccgtcaacgtggcgtggtgtgctctgtgtttgctgacgcaacccccactggctggggcattgccaccacctgtcaactcctttctgggactttcgctttccccctcccgatcgccacggcagaactcatcgccgcctgccttgcccgctgctggacaggggctaggttgctgggcactgataattccgtggtgttgtctccataaagtaggaaacactacacgattccataaagtaggaaacactacatcactccataaagtaggaaacactacatgtgccttctagttgccagccatctgttgtttgcccctcccccgtgccttccttgaccctggaaggtgccactcccactgtcctttcctaataaaatgaggaaattgcatcgcattgtctgagtaggtgtcattctattctggggggtggggtggggcaggacagcaagggggaggattgggaagacaatagcaggcatgctggggatgcggtgggctctatggctctagagcatggctacgtagataagtagcatggcgggttaatcattaactacacctgcaggaggaacccctagtgatggagttggccactccctctctgcgcgctcgctcgctcactgaggccgggcgaccaaaggtcgcccgacgcccgggcggcctcagtgagcgagcgagcgcgcagctgcctgcaggggcgcgcctcgaggcatgcggtaccaagcttgtcgagaagtactagaggatcataatcagccataccacatttgtagaggttttacttgctttaaaaaacctcccacacctccccctgaacctgaaacataaaatgaatgcaattgttgttgttaacttgtttattgcagcttataatggttacaaataaagcaatagcatcacaaatttcacaaataaagcatttttttcactgcattctagttgtggtttgtccaaactcatcaatgtatcttatcatgtctggatctgatcactgatatcgcctaggagatccgaaccagataagtgaaatctagttccaaactattttgtcatttttaattttcgtattagcttacgacgctacacccagttcccatctattttgtcactcttccctaaataatccttaaaaactccatttccacccctcccagttcccaactattttgtccgcccacagcggggcatttttcttcctgttatgtttttaatcaaacatcctgccaactccatgtgacaaaccgtcatcttcggctactttttctctgtcacagaatgaaaatttttctgtcatctcttcgttattaatgtttgtaattgactgaatatcaacgcttatttgcagcctgaatggcgaatgggacgcgccctgtagcggcgcattaagcgcggcgggtgtggtggttacgcgcagcgtgaccgctacacttgccagcgccctagcgcccgctcctttcgctttcttcccttcctttctcgccacgttcgccggctttccccgtcaagctctaaatcgggggctccctttagggttccgatttagtgctttacggcacctcgaccccaaaaaacttgattagggtgatggttcacgtagtgggccatcgccctgatagacggtttttcgccctttgacgttggagtccacgttctttaatagtggactcttgttccaaactggaacaacactcaaccctatctcggtctattcttttgatttataagggattttgccgatttcggcctattggttaaaaaatgagctgatttaacaaaaatttaacgcgaattttaacaaaatattaacgtttacaatttcaggtggcacttttcggggaaatgtgcgcggaacccctatttgtttatttttctaaatacattcaaatatgtatccgctcatgagacaataaccctgataaatgcttcaataatattgaaaaaggaagagtatgagtattcaacatttccgtgtcgcccttattcccttttttgcggcattttgccttcctgtttttgctcacccagaaacgctggtgaaagtaaaagatgctgaagatcagttgggtgcacgagtgggttacatcgaactggatctcaacagcggtaagatccttgagagttttcgccccgaagaacgttttccaatgatgagcacttttaaagttctgctatgtggcgcggtattatcccgtattgacgccgggcaagagcaactcggtcgccgcatacactattctcagaatgacttggttgagtactcaccagtcacagaaaagcatcttacggatggcatgacagtaagagaattatgcagtgctgccataaccatgagtgataacactgcggccaacttacttctgacaacgatcggaggaccgaaggagctaaccgcttttttgcacaacatgggggatcatgtaactcgccttgatcgttgggaaccggagctgaatgaagccataccaaacgacgagcgtgacaccacgatgcctgtagcaatggcaacaacgttgcgcaaactattaactggcgaactacttactctagcttcccggcaacaattaatagactggatggaggcggataaagttgcaggaccacttctgcgctcggcccttccggctggctggtttattgctgataaatctggagccggtgagcgtgggtctcgcggtatcattgcagcactggggccagatggtaagccctcccgtatcgtagttatctacacgacggggagtcaggcaactatggatgaacgaaatagacagatcgctgagataggtgcctcactgattaagcattggtaactgtcagaccaagtttactcatatatactttagattgatttaaaacttcatttttaatttaaaaggatctaggtgaagatcctttttgataatctcatgaccaaaatcccttaacgtgagttttcgttccactgagcgtcagaccccgtagaaaagatcaaaggatcttcttgagatcctttttttctgcgcgtaatctgctgcttgcaaacaaaaaaaccaccgctaccagcggtggtttgtttgccggatcaagagctaccaactctttttccgaaggtaactggcttcagcagagcgcagataccaaatactgtccttctagtgtagccgtagttaggccaccacttcaagaactctgtagcaccgcctacatacctcgctctgctaatcctgttaccagtggctgctgccagtggcgataagtcgtgtcttaccgggttggactcaagacgatagttaccggataaggcgcagcggtcgggctgaacggggggttcgtgcacacagcccagcttggagcgaacgacctacaccgaactgagatacctacagcgtgagcattgagaaagcgccacgcttcccgaagggagaaaggcggacaggtatccggtaagcggcagggtcggaacaggagagcgcacgagggagcttccagggggaaacgcctggtatctttatagtcctgtcgggtttcgccacctctgacttgagcgtcgatttttgtgatgctcgtcaggggggcggagcctatggaaaaacgccagcaacgcggcctttttacggttcctggccttttgctggccttttgctcacatgttctttcctgcgttatcccctgattctgtggataaccgtattaccgcctttgagtgagctgataccgctcgccgcagccgaacgaccgagcgcagcgagtcagtgagcgaggaagcggaagagcgcctgatgcggtattttctccttacgcatctgtgcggtatttcacaccgcagaccagccgcgtaacctggcaaaatcggttacggttgagtaataaatggatgccctgcgtaagcgggtgtgggcggacaataaagtcttaaactgaacaaaatagatctaaactatgacaataaagtcttaaactagacagaatagttgtaaactgaaatcagtccagttatgctgtgaaaaagcatactggacttttgttatggctaaagcaaactcttcattttctgaagtgcaaattgcccgtcgtattaaagaggggcgtggccaagggcatggtaaagactatattcgcggcgttgtgacaatttaccgaacaactccgcggccgggaagccgatctcggcttgaacgaattgttaggtggcggtacttgggtcgatatcaaagtgcatcacttcttcccgtatgcccaactttgtatagagagccactgcgggatcgtcaccgtaatctgcttgcacgtagatcacataagcaccaagcgcgttggcctcatgcttgaggagattgatgagcgcggtggcaatgccctgcctccggtgctcgccggagactgcgagatcatagatatagatctcactacgcggctgctcaaacctgggcagaacgtaagccgcgagagcgccaacaaccgcttcttggtcgaaggcagcaagcgcgatgaatgtcttactacggagcaagttcccgaggtaatcggagtccggctgatgttgggagtaggtggctacgtctccgaactcacgaccgaaaagatcaagagcagcccgcatggatttgacttggtcagggccgagcctacatgtgcgaatgatgcccatacttgagccacctaactttgttttagggcgactgccctgctgcgtaacatcgttgctgctgcgtaacatcgttgctgctccataacatcaaacatcgacccacggcgtaacgcgcttgctgcttggatgcccgaggcatagactgtacaaaaaaacagtcataacaagccatgaaaaccgccactgcgccgttaccaccgctgcgttcggtcaaggttctggaccagttgcgtgagcgcatacgctacttgcattacagtttacgaaccgaacaggcttatgtcaactgggttcgtgccttcatccgtttccacggtgtgcgtcacccggcaaccttgggcagcagcgaagtcgaggcatttctgtcctggctggcgaacgagcgcaaggtttcggtctccacgcatcgtcaggcattggcggccttgctgttcttctacggcaaggtgctgtgcacggatctgccctggcttcaggagatcggaagacctcggccgtcgcggcgcttgccggtggtgctgaccccggatgaagtggttcgcatcctcggttttctggaaggcgagcatcgtttgttcgcccaggactctagctatagttctagtggttggctacgtatactccggaatattaatagatcatggagataattaaaatgataaccatctcgcaaataaataagtattttactgttttcgtaacagttttgtaataaaaaaacctataaatattccggattattcataccgtcccaccatcgggcgcggatctcggtccgaaaccatgtcgtactaccatcaccatcaccatcacgattacgatatcccaacgaccgaaaacctgtattttcagggcgccatgggatcc

SEQ ID NO: 209 - DNA, 10795 bp, synthetic construct
  misc_feature 1..10795: note = Description of Artificial Sequence: Synthetic polynucleotide
  source 1..10795: mol_type = other DNA
ggccggcccctgcaggcagctgcgcgctcgctcgctcactgaggccgcccgggcaaagcccgggcgtcgggcgacctttggtcgcccggcctcagtgagcgagcgagcgcgcagagagggagtggccaactccatcactaggggttccttgtagttaatgattaacccgccatgctacttatctacgtagccatgctctagacgggggaggctgctggtgaatattaaccaaggtcaccccagttatcggaggagcaaacaggggctaagtccacacgcgtggtaccgtctgtctgcacatttcgtagagcgagtgttccgatactctaatctccctaggcaaggttcatatttgtgtaggttacttattctccttttgttgactaagtcaataatcagaatcagcaggtttggagtcagcttggcagggatcagcagcctgggttggaaggagggggtataaaagccccttcaccaggagaagccgtcacacagatccacaagctcctgaagaggtaagggtttaagggatggttggttggtggggtattaatgtttaattacctggagcacctgcctgaaatcactttttttcaggttggtttaaacgccgccaccatgcagatcgagctgtctacctgcttcttcctgtgcctgctgcggttctgcttcagcgccaccagaagatattacctgggcgccgtggaactgagctgggactacatgcagtctgacctgggagagctgcccgtggacgctagatttcctccaagagtgcccaagagcttccccttcaacacctccgtggtgtacaagaaaaccctgttcgtggaattcaccgaccacctgttcaatatcgccaagcctcggcctccttggatgggactgctgggacctacaattcaggccgaggtgtacgacaccgtggtcatcaccctgaagaacatggccagccatcctgtgtctctgcacgccgtgggagtgtcttattggaaggcttctgagggcgccgagtacgacgatcagacaagccagagagagaaagaggacgacaaggttttccctggcggcagccacacctatgtctggcaggtcctgaaagaaaacggccctatggcctccgatcctctgtgcctgacatacagctacctgagccacgtggacctggtcaaggacctgaattctggcctgatcggagccctgctcgtgtgtagagaaggcagcctggccaaagagaaaacccagacactgcacaagttcatcctgctgttcgccgtgttcgacgagggcaagagctggcacagcgagacaaagaacagcctgatgcaggacagggatgccgcctctgctagagcttggcctaagatgcacaccgtgaacggctacgtgaacagaagcctgcctggactgatcggctgccacagaaagtccgtgtactggcacgtgatcggcatgggcacaacacctgaggtgcacagcatctttctggaaggccacaccttcctcgtgcggaaccacagacaggccagcctggaaatcagccctatcaccttcctgaccgctcagaccctgctgatggatctgggccagtttctgctgttctgccacatcagctcccaccagcacgatggcatggaagcctacgtgaaggtggacagctgccccgaagaaccccagctgcggatgaagaacaacgaggaagccgaggactacgacgacgacctgaccgactctgagatggacgtcgtcagattcgacgacgataacagccccagcttcatccagatcagaagcgtggccaagaagcaccccaagacctgggtgcactatatcgccgccgaggaagaggactgggattacgctcctctggtgctggcccctgacgacagaagctacaagagccagtacctgaacaacggccctcagcggatcggccggaagtataagaaagtgcggttcatggcctacaccgacgagacattcaagaccagagaggccatccagcacgagagcggaattctgggccctctgctgtatggcgaagtgggcgatacactgctgatcatcttcaagaaccaggccagcagaccctacaacatctaccctcacggcatcaccgatgtgcggcccctgtattctagaaggctgcccaagggcgtgaagcacctgaaggacttccctatcctgcctggcgagattttcaagtacaagtggaccgtgaccgtggaagatggccccaccaagagcgaccctagatgtctgacacggtactacagcagcttcgtgaacatggaacgcgacctggccagcggcctgattggacctctgctgatctgctacaaagaaagcgtggaccagcggggcaaccagatcatgagcgacaagcggaacgtgatcctgtttagcgtgttcgatgagaaccggtcctggtatctgaccgagaacatccagcggtttctgcccaatcctgccggggtgcaactggaagatcctgagttccaggcaagcaacatcatgcactccatcaatggctatgtgttcgacagcctgcagctgagcgtgtgcctgcacgaagtggcctactggtacatcctgagcattggcgcccagaccgacttcctgtccgtgttctttagcggctacaccttcaagcacaagatggtgtacgaggataccctgacactgttcccattcagcggcgagacagtgttcatgagcatggaaaaccccggcctgtggattctgggctgtcacaacagcgacttccggaacagaggcatgacagccctgctgaaggtgtccagctgcgacaagaacaccggcgactactacgaggacagctatgaggacatcagcgcctacctgctgagcaagaacaatgccatcgagcctcggagcttcagccagaatcctcctgtgctgaagcggcaccagcgcgagatcaccagaacaaccctgcagagcgaccaagaggaaatcgattacgacgacaccatcagcgtcgagatgaagaaagaagatttcgacatctacgacgaggacgagaatcagagccccagaagctttcagaaaaagacccggcactacttcattgccgccgtcgagagactgtgggactacggcatgtctagcagccctcacgtgctgagaaatagagcccagagcggcagcgtgccccagttcaagaaagtggtgttccaagagttcaccgacggcagcttcacccagccactgtatagaggcgagctgaacgagcatctgggcctgctgggcccttatatcagagccgaagtggaagataacatcatggtcaccttccggaatcaggctagccggccttacagcttctacagctccctgatcagctacgaagaggaccagagacagggcgctgagcccagaaagaacttcgtgaagcccaacgagactaagacctacttttggaaggtgcagcaccacatggcccctacaaaggacgagttcgactgcaaagcctgggcctacttctccgatgtggatctggaaaaggacgtgcacagcgggctcatcggaccactgcttgtgtgccacaccaacacactgaaccccgctcacggcagacaagtgacagtgcaagagttcgccctgttcttcaccatcttcgacgaaacaaagagctggtacttcaccgagaatatggaacggaactgcagagccccttgcaacatccagatggaagatcccaccttcaaagagaactaccggttccacgccatcaacggctacatcatggacacactgcccggcctggttatggcccaggatcagagaatccggtggtatctgctgtccatgggctccaacgagaatatccacagcatccacttcagcggccacgtgttcaccgtgcggaaaaaagaagagtacaaaatggccctgtacaatctgtaccctggggtgttcgaaaccgtggaaatgctgccttccaaggccggcatttggagagtggaatgtctgattggagagcacctccacgccggaatgagcaccctgtttctggtgtacagcaacaagtgtcagacccctctcggcatggcctctggacacatcagagacttccagatcaccgcctctggccagtacggacagtgggctcctaaactggctcggctgcactacagcggcagcatcaatgcctggtccaccaaagagcccttcagctggatcaaggtggacctgctggctcccatgatcatccacggaatcaagacccagggcgccagacagaagttcagcagcctgtacatcagccagttcatcatcatgtacagcctggacggcaagaagtggcagacctacagaggcaacagcaccggcacactcatggtgttcttcggcaacgtggactccagcggcattaagcacaacatcttcaaccctccaatcattgcccggtacatccggctgcaccccacacactacagcatccggtctaccctgagaatggaactgatgggctgcgacctgaacagctgctctatgcccctcggaatggaaagcaaggccatcagcgacgcccagatcacagccagcagctacttcaccaacatgttcgccacttggagcccctccaaggctagactgcatctgcagggcagaagcaacgcttggaggccccaagtgaacaaccccaaagagtggctgcaggttgactttcaaaagaccatgaaagtgaccggcgtgaccacacagggcgtcaagtctctgctgacctctatgtacgtgaaagagttcctgatctccagcagccaggacggccatcagtggaccctgtttttccagaacggcaaagtgaaagtgttccagggcaatcaggacagcttcacacccgtggtcaattctctggaccctccactgctgaccagatacctgcggattcaccctcagtcttgggtgcaccagatcgctctgcggatggaagtgctgggctgtgaagctcaggacctctactagttaattaagagcatcttaccgccatttattcccatatttgttctgtttttcttgatttgggtatacatttaaatgttaataaaacaaaatggtggggcaatcatttacatttttagggatatgtaattactagttcaggtgtattgccacaagacaaacatgttaagaaactttcccgttatttacgctctgttcctgttaatcaacctctggattacaaaatttgtgaaagattgactgatattcttaactatgttgctccttttacgctgtgtggatatgctgctttatagcctctgtatctagctattgcttcccgtacggctttcgttttctcctccttgtataaatcctggttgctgtctcttttagaggagttgtggcccgttgtccgtcaacgtggcgtggtgtgctctgtgtttgctgacgcaacccccactggctggggcattgccaccacctgtcaactcctttctgggactttcgctttccccctcccgatcgccacggcagaactcatcgccgcctgccttgcccgctgctggacaggggctaggttgctgggcactgataattccgtggtgttgtctgtgccttctagttgccagccatctgttgtttgcccctcccccgtgccttccttgaccctggaaggtgccactcccactgtcctttcctaataaaatgaggaaattgcatcgcattgtctgagtaggtgtcattctattctggggggtggggtggggcaggacagcaagggggaggattgggaagacaatagcaggcatgctggggatgcggtgggctctatggctctagagcatggctacgtagataagtagcatggcgggttaatcattaactacacctgcaggaggaacccctagtgatggagttggccactccctctctgcgcgctcgctcgctcactgaggccgggcgaccaaaggtcgcccgacgcccgggcggcctcagtgagcgagcgagcgcgcagctgcctgcaggggcgcgcctcgaggcatgcggtaccaagcttgtcgagaagtactagaggatcataatcagccataccacatttgtagaggttttacttgctttaaaaaacctcccacacctccccctgaacctgaaacataaaatgaatgcaattgttgttgttaacttgtttattgcagcttataatggttacaaataaagcaatagcatcacaaatttcacaaataaagcatttttttcactgcattctagttgtggtttgtccaaactcatcaatgtatcttatcatgtctggatctgatcactgatatcgcctaggagatccgaaccagataagtgaaatctagttccaaactattttgtcatttttaattttcgtattagcttacgacgctacacccagttcccatctattttgtcactcttccctaaataatccttaaaaactccatttccacccctcccagttcccaactattttgtccgcccacagcggggcatttttcttcctgttatgtttttaatcaaacatcctgccaactccatgtgacaaaccgtcatcttcggctactttttctctgtcacagaatgaaaatttttctgtcatctcttcgttattaatgtttgtaattgactgaatatcaacgcttatttgcagcctgaatggcgaatgggacgcgccctgtagcggcgcattaagcgcggcgggtgtggtggttacgcgcagcgtgaccgctacacttgccagcgccctagcgcccgctcctttcgctttcttcccttcctttctcgccacgttcgccggctttccccgtcaagctctaaatcgggggctccctttagggttccgatttagtgctttacggcacctcgaccccaaaaaacttgattagggtgatggttcacgtagtgggccatcgccctgatagacggtttttcgccctttgacgttggagtccacgttctttaatagtggactcttgttccaaactggaacaacactcaaccctatctcggtctattcttttgatttataagggattttgccgatttcggcctattggttaaaaaatgagctgatttaacaaaaatttaacgcgaattttaacaaaatattaacgtttacaatttcaggtggcacttttcggggaaatgtgcgcggaacccctatttgtttatttttctaaatacattcaaatatgtatccgctcatgagacaataaccctgataaatgcttcaataatattgaaaaaggaagagtatgagtattcaacatttccgtgtcgcccttattcccttttttgcggcattttgccttcctgtttttgctcacccagaaacgctggtgaaagtaaaagatgctgaagatcagttgggtgcacgagtgggttacatcgaactggatctcaacagcggtaagatccttgagagttttcgccccgaagaacgttttccaatgatgagcacttttaaagttctgctatgtggcgcggtattatcccgtattgacgccgggcaagagcaactcggtcgccgcatacactattctcagaatgacttggttgagtactcaccagtcacagaaaagcatcttacggatggcatgacagtaagagaattatgcagtgctgccataaccatgagtgataacactgcggccaacttacttctgacaacgatcggaggaccgaaggagctaaccgcttttttgcacaacatgggggatcatgtaactcgccttgatcgttgggaaccggagctgaatgaagccataccaaacgacgagcgtgacaccacgatgcctgtagcaatggcaacaacgttgcgcaaactattaactggcgaactacttactctagcttcccggcaacaattaatagactggatggaggcggataaagttgcaggaccacttctgcgctcggcccttccggctggctggtttattgctgataaatctggagccggtgagcgtgggtctcgcggtatcattgcagcactggggccagatggtaagccctcccgtatcgtagttatctacacgacggggagtcaggcaactatggatgaacgaaatagacagatcgctgagataggtgcctcactgattaagcattggtaactgtcagaccaagtttactcatatatactttagattgatttaaaacttcatttttaatttaaaaggatctaggtgaagatcctttttgataatctcatgaccaaaatcccttaacgtgagttttcgttccactgagcgtcagaccccgtagaaaagatcaaaggatcttcttgagatcctttttttctgcgcgtaatctgctgcttgcaaacaaaaaaaccaccgctaccagcggtggtttgtttgccggatcaagagctaccaactctttttccgaaggtaactggcttcagcagagcgcagataccaaatactgtccttctagtgtagccgtagttaggccaccacttcaagaactctgtagcaccgcctacatacctcgctctgctaatcctgttaccagtggctgctgccagtggcgataagtcgtgtcttaccgggttggactcaagacgatagttaccggataaggcgcagcggtcgggctgaacggggggttcgtgcacacagcccagcttggagcgaacgacctacaccgaactgagatacctacagcgtgagcattgagaaagcgccacgcttcccgaagggagaaaggcggacaggtatccggtaagcggcagggtcggaacaggagagcgcacgagggagcttccagggggaaacgcctggtatctttatagtcctgtcgggtttcgccacctctgacttgagcgtcgatttttgtgatgctcgtcaggggggcggagcctatggaaaaacgccagcaacgcggcctttttacggttcctggccttttgctggccttttgctcacatgttctttcctgcgttatcccctgattctgtggataaccgtattaccgcctttgagtgagctgataccgctcgccgcagccgaacgaccgagcgcagcgagtcagtgagcgaggaagcggaagagcgcctgatgcggtattttctccttacgcatctgtgcggtatttcacaccgcagaccagccgcgtaacctggcaaaatcggttacggttgagtaataaatggatgccctgcgtaagcgggtgtgggcggacaataaagtcttaaactgaacaaaatagatctaaactatgacaataaagtcttaaactagacagaatagttgtaaactgaaatcagtccagttatgctgtgaaaaagcatactggacttttgttatggctaaagcaaactcttcattttctgaagtgcaaattgcccgtcgtattaaagaggggcgtggccaagggcatggtaaagactatattcgcggcgttgtgacaatttaccgaacaactccgcggccgggaagccgatctcggcttgaacgaattgttaggtggcggtacttgggtcgatatcaaagtgcatcacttcttcccgtatgcccaactttgtatagagagccactgcgggatcgtcaccgtaatctgcttgcacgtagatcacataagcaccaagcgcgttggcctcatgcttgaggagattgatgagcgcggtggcaatgccctgcctccggtgctcgccggagactgcgagatcatagatatagatctcactacgcggctgctcaaacctgggcagaacgtaagccgcgagagcgccaacaaccgcttcttggtcgaaggcagcaagcgcgatgaatgtcttactacggagcaagttcccgaggtaatcggagtccggctgatgttgggagtaggtggctacgtctccgaactcacgaccgaaaagatcaagagcagcccgcatggatttgacttggtcagggccgagcctacatgtgcgaatgatgcccatacttgagccacctaactttgttttagggcgactgccctgctgcgtaacatcgttgctgctgcgtaacatcgttgctgctccataacatcaaacatcgacccacggcgtaacgcgcttgctgcttggatgcccgaggcatagactgtacaaaaaaacagtcataacaagccatgaaaaccgccactgcgccgttaccaccgctgcgttcggtcaaggttctggaccagttgcgtgagcgcatacgctacttgcattacagtttacgaaccgaacaggcttatgtcaactgggttcgtgccttcatccgtttccacggtgtgcgtcacccggcaaccttgggcagcagcgaagtcgaggcatttctgtcctggctggcgaacgagcgcaaggtttcggtctccacgcatcgtcaggcattggcggccttgctgttcttctacggcaaggtgctgtgcacggatctgccctggcttcaggagatcggaagacctcggccgtcgcggcgcttgccggtggtgctgaccccggatgaagtggttcgcatcctcggttttctggaaggcgagcatcgtttgttcgcccaggactctagctatagttctagtggttggctacgtatactccggaatattaatagatcatggagataattaaaatgataaccatctcgcaaataaataagtattttactgttttcgtaacagttttgtaataaaaaaacctataaatattccggattattcataccgtcccaccatcgggcgcggatctcggtccgaaaccatgtcgtactaccatcaccatcaccatcacgattacgatatcccaacgaccgaaaacctgtattttcagggcgccatgggatcc

SEQ ID NO: 210 - DNA, 10846 bp, synthetic construct
  misc_feature 1..10846: note = Description of Artificial Sequence: Synthetic polynucleotide
  source 1..10846: mol_type = other DNA
ggccggcccctgcaggcagctgcgcgctcgctcgctcactgaggccgcccgggcaaagcccgggcgtcgggcgacctttggtcgcccggcctcagtgagcgagcgagcgcgcagagagggagtggccaactccatcactaggggttccttgtagttaatgattaacccgccatgctacttatctacgtagccatgctctagacgggggaggctgctggtgaatattaaccaaggtcaccccagttatcggaggagcaaacaggggctaagtccacacgcgtggtaccgtctgtctgcacatttcgtagagcgagtgttccgatactctaatctccctaggcaaggttcatatttgtgtaggttacttattctccttttgttgactaagtcaataatcagaatcagcaggtttggagtcagcttggcagggatcagcagcctgggttggaaggagggggtataaaagccccttcaccaggagaagccgtcacacagatccacaagctcctgaagaggtaagggtttaagggatggttggttggtggggtattaatgtttaattacctggagcacctgcctgaaatcactttttttcaggttggtttaaacgccgccaccatgcagattgagctgagcacctgcttcttcctgtgcctgctgaggttctgcttctctgccaccaggagatactacctgggggctgtggagctgagctgggactacatgcagtctgacctgggggagctgcctgtggatgccaggttcccccccagagtgcccaagagcttccccttcaacacctctgtggtgtacaagaagaccctgtttgtggagttcactgaccacctgttcaacattgccaagcccaggcccccctggatgggcctgctgggccccaccatccaggctgaggtgtatgacactgtggtgatcaccctgaagaacatggccagccaccctgtgagcctgcatgctgtgggggtgagctactggaaggcctctgagggggctgagtatgatgaccagaccagccagagggagaaggaggatgacaaggtgttccctgggggcagccacacctatgtgtggcaggtgctgaaggagaatggccccatggcctctgaccccctgtgcctgacctacagctacctgagccatgtggacctggtgaaggacctgaactctggcctgattggggccctgctggtgtgcagggagggcagcctggccaaggagaagacccagaccctgcacaagttcatcctgctgtttgctgtgtttgatgagggcaagagctggcactctgaaaccaagaacagcctgatgcaggacagggatgctgcctctgccagggcctggcccaagatgcacactgtgaatggctatgtgaacaggagcctgcctggcctgattggctgccacaggaagtctgtgtactggcatgtgattggcatgggcaccacccctgaggtgcacagcatcttcctggagggccacaccttcctggtcaggaaccacaggcaggccagcctggagatcagccccatcaccttcctgactgcccagaccctgctgatggacctgggccagttcctgctgttctgccacatcagcagccaccagcatgatggcatggaggcctatgtgaaggtggacagctgccctgaggagccccagctgaggatgaagaacaatgaggaggctgaggactatgatgatgacctgactgactctgagatggatgtggtgaggtttgatgatgacaacagccccagcttcatccagatcaggtctgtggccaagaagcaccccaagacctgggtgcactacattgctgctgaggaggaggactgggactatgcccccctggtgctggcccctgatgacaggagctacaagagccagtacctgaacaatggcccccagaggattggcaggaagtacaagaaggtcaggttcatggcctacactgatgaaaccttcaagaccagggaggccatccagcatgagtctggcatcctgggccccctgctgtatggggaggtgggggacaccctgctgatcatcttcaagaaccaggccagcaggccctacaacatctacccccatggcatcactgatgtgaggcccctgtacagcaggaggctgcccaagggggtgaagcacctgaaggacttccccatcctgcctggggagatcttcaagtacaagtggactgtgactgtggaggatggccccaccaagtctgaccccaggtgcctgaccagatactacagcagctttgtgaacatggagagggacctggcctctggcctgattggccccctgctgatctgctacaaggagtctgtggaccagaggggcaaccagatcatgtctgacaagaggaatgtgatcctgttctctgtgtttgatgagaacaggagctggtacctgactgagaacatccagaggttcctgcccaaccctgctggggtgcagctggaggaccctgagttccaggccagcaacatcatgcacagcatcaatggctatgtgtttgacagcctgcagctgtctgtgtgcctgcatgaggtggcctactggtacatcctgagcattggggcccagactgacttcctgtctgtgttcttctctggctacaccttcaagcacaagatggtgtatgaggacaccctgaccctgttccccttctctggggagactgtgttcatgagcatggagaaccctggcctgtggattctgggctgccacaactctgacttcaggaacaggggcatgactgccctgctgaaagtctccagctgtgacaagaacactggggactactatgaggacagctatgaggacatctctgcctacctgctgagcaagaacaatgccattgagcccaggagcttcagccagaatgccactaatgtgtctaacaacagcaacaccagcaatgacagcaatgtgtctcccccagtgctgaagaggcaccagagggagatcaccaggaccaccctgcagtctgaccaggaggagattgactatgatgacaccatctctgtggagatgaagaaggaggactttgacatctacgacgaggacgagaaccagagccccaggagcttccagaagaagaccaggcactacttcattgctgctgtggagaggctgtgggactatggcatgagcagcagcccccatgtgctgaggaacagggcccagtctggctctgtgccccagttcaagaaggtggtgttccaggagttcactgatggcagcttcacccagcccctgtacagaggggagctgaatgagcacctgggcctgctgggcccctacatcagggctgaggtggaggacaacatcatggtgaccttcaggaaccaggccagcaggccctacagcttctacagcagcctgatcagctatgaggaggaccagaggcagggggctgagcccaggaagaactttgtgaagcccaatgaaaccaagacctacttctggaaggtgcagcaccacatggcccccaccaaggatgagtttgactgcaaggcctgggcctacttctctgatgtggacctggagaaggatgtgcactctggcctgattggccccctgctggtgtgccacaccaacaccctgaaccctgcccatggcaggcaggtgactgtgcaggagtttgccctgttcttcaccatctttgatgaaaccaagagctggtacttcactgagaacatggagaggaactgcagggccccctgcaacatccagatggaggaccccaccttcaaggagaactacaggttccatgccatcaatggctacatcatggacaccctgcctggcctggtgatggcccaggaccagaggatcaggtggtacctgctgagcatgggcagcaatgagaacatccacagcatccacttctctggccatgtgttcactgtgaggaagaaggaggagtacaagatggccctgtacaacctgtaccctggggtgtttgagactgtggagatgctgcccagcaaggctggcatctggagggtggagtgcctgattggggagcacctgcatgctggcatgagcaccctgttcctggtgtacagcaacaagtgccagacccccctgggcatggcctctggccacatcagggacttccagatcactgcctctggccagtatggccagtgggcccccaagctggccaggctgcactactctggcagcatcaatgcctggagcaccaaggagcccttcagctggatcaaggtggacctgctggcccccatgatcatccatggcatcaagacccagggggccaggcagaagttcagcagcctgtacatcagccagttcatcatcatgtacagcctggatggcaagaagtggcagacctacaggggcaacagcactggcaccctgatggtgttctttggcaatgtggacagctctggcatcaagcacaacatcttcaacccccccatcattgccagatacatcaggctgcaccccacccactacagcatcaggagcaccctgaggatggagctgatgggctgtgacctgaacagctgcagcatgcccctgggcatggagagcaaggccatctctgatgcccagatcactgccagcagctacttcaccaacatgtttgccacctggagccccagcaaggccaggctgcacctgcagggcaggagcaatgcctggaggccccaggtcaacaaccccaaggagtggctgcaggtggacttccagaagaccatgaaggtgactggggtgaccacccagggggtgaagagcctgctgaccagcatgtatgtgaaggagttcctgatcagcagcagccaggatggccaccagtggaccctgttcttccagaatggcaaggtgaaggtgttccagggcaaccaggacagcttcacccctgtggtgaacagcctggacccccccctgctgaccagatacctgaggattcacccccagagctgggtgcaccagattgccctgaggatggaggtgctgggctgtgaggcccaggacctgtactgattaattaagagcatcttaccgccatttattcccatatttgttctgtttttcttgatttgggtatacatttaaatgttaataaaacaaaatggtggggcaatcatttacatttttagggatatgtaattactagttcaggtgtattgccacaagacaaacatgttaagaaactttcccgttatttacgctctgttcctgttaatcaacctctggattacaaaatttgtgaaagattgactgatattcttaactatgttgctccttttacgctgtgtggatatgctgctttatagcctctgtatctagctattgcttcccgtacggctttcgttttctcctccttgtataaatcctggttgctgtctcttttagaggagttgtggcccgttgtccgtcaacgtggcgtggtgtgctctgtgtttgctgacgcaacccccactggctggggcattgccaccacctgtcaactcctttctgggactttcgctttccccctcccgatcgccacggcagaactcatcgccgcctgccttgcccgctgctggacaggggctaggttgctgggcactgataattccgtggtgttgtctgtgccttctagttgccagccatctgttgtttgcccctcccccgtgccttccttgaccctggaaggtgccactcccactgtcctttcctaataaaatgaggaaattgcatcgcattgtctgagtaggtgtcattctattctggggggtggggtggggcaggacagcaagggggaggattgggaagacaatagcaggcatgctggggatgcggtgggctctatggctctagagcatggctacgtagataagtagcatggcgggttaatcattaactacacctgcaggaggaacccctagtgatggagttggccactccctctctgcgcgctcgctcgctcactgaggccgggcgaccaaaggtcgcccgacgcccgggcggcctcagtgagcgagcgagcgcgcagctgcctgcaggggcgcgcctcgaggcatgcggtaccaagcttgtcgagaagtactagaggatcataatcagccataccacatttgtagaggttttacttgctttaaaaaacctcccacacctccccctgaacctgaaacataaaatgaatgcaattgttgttgttaacttgtttattgcagcttataatggttacaaataaagcaatagcatcacaaatttcacaaataaagcatttttttcactgcattctagttgtggtttgtccaaactcatcaatgtatcttatcatgtctggatctgatcactgatatcgcctaggagatccgaaccagataagtgaaatctagttccaaactattttgtcatttttaattttcgtattagcttacgacgctacacccagttcccatctattttgtcactcttccctaaataatccttaaaaactccatttccacccctcccagttcccaactattttgtccgcccacagcggggcatttttcttcctgttatgtttttaatcaaacatcctgccaactccatgtgacaaaccgtcatcttcggctactttttctctgtcacagaatgaaaatttttctgtcatctcttcgttattaatgtttgtaattgactgaatatcaacgcttatttgcagcctgaatggcgaatgggacgcgccctgtagcggcgcattaagcgcggcgggtgtggtggttacgcgcagcgtgaccgctacacttgccagcgccctagcgcccgctcctttcgctttcttcccttcctttctcgccacgttcgccggctttccccgtcaagctctaaatcgggggctccctttagggttccgatttagtgctttacggcacctcgaccccaaaaaacttgattagggtgatggttcacgtagtgggccatcgccctgatagacggtttttcgccctttgacgttggagtccacgttctttaatagtggactcttgttccaaactggaacaacactcaaccctatctcggtctattcttttgatttataagggattttgccgatttcggcctattggttaaaaaatgagctgatttaacaaaaatttaacgcgaattttaacaaaatattaacgtttacaatttcaggtggcacttttcggggaaatgtgcgcggaacccctatttgtttatttttctaaatacattcaaatatgtatccgctcatgagacaataaccctgataaatgcttcaataatattgaaaaaggaagagtatgagtattcaacatttccgtgtcgcccttattcccttttttgcggcattttgccttcctgtttttgctcacccagaaacgctggtgaaagtaaaagatgctgaagatcagttgggtgcacgagtgggttacatcgaactggatctcaacagcggtaagatccttgagagttttcgccccgaagaacgttttccaatgatgagcacttttaaagttctgctatgtggcgcggtattatcccgtattgacgccgggcaagagcaactcggtcgccgcatacactattctcagaatgacttggttgagtactcaccagtcacagaaaagcatcttacggatggcatgacagtaagagaattatgcagtgctgccataaccatgagtgataacactgcggccaacttacttctgacaacgatcggaggaccgaaggagctaaccgcttttttgcacaacatgggggatcatgtaactcgccttgatcgttgggaaccggagctgaatgaagccataccaaacgacgagcgtgacaccacgatgcctgtagcaatggcaacaacgttgcgcaaactattaactggcgaactacttactctagcttcccggcaacaattaatagactggatggaggcggataaagttgcaggaccacttctgcgctcggcccttccggctggctggtttattgctgataaatctggagccggtgagcgtgggtctcgcggtatcattgcagcactggggccagatggtaagccctcccgtatcgtagttatctacacgacggggagtcaggcaactatggatgaacgaaatagacagatcgctgagataggtgcctcactgattaagcattggtaactgtcagaccaagtttactcatatatactttagattgatttaaaacttcatttttaatttaaaaggatctaggtgaagatcctttttgataatctcatgaccaaaatcccttaacgtgagttttcgttccactgagcgtcagaccccgtagaaaagatcaaaggatcttcttgagatcctttttttctgcgcgtaatctgctgcttgcaaacaaaaaaaccaccgctaccagcggtggtttgtttgccggatcaagagctaccaactctttttccgaaggtaactggcttcagcagagcgcagataccaaatactgtccttctagtgtagccgtagttaggccaccacttcaagaactctgtagcaccgcctacatacctcgctctgctaatcctgttaccagtggctgctgccagtggcgataagtcgtgtcttaccgggttggactcaagacgatagttaccggataaggcgcagcggtcgggctgaacggggggttcgtgcacacagcccagcttggagcgaacgacctacaccgaactgagatacctacagcgtgagcattgagaaagcgccacgcttcccgaagggagaaaggcggacaggtatccggtaagcggcagggtcggaacaggagagcgcacgagggagcttccagggggaaacgcctggtatctttatagtcctgtcgggtttcgccacctctgacttgagcgtcgatttttgtgatgctcgtcaggggggcggagcctatggaaaaacgccagcaacgcggcctttttacggttcctggccttttgctggccttttgctcacatgttctttcctgcgttatcccctgattctgtggataaccgtattaccgcctttgagtgagctgataccgctcgccgcagccgaacgaccgagcgcagcgagtcagtgagcgaggaagcggaagagcgcctgatgcggtattttctccttacgcatctgtgcggtatttcacaccgcagaccagccgcgtaacctggcaaaatcggttacggttgagtaataaatggatgccctgcgtaagcgggtgtgggcggacaataaagtcttaaactgaacaaaatagatctaaactatgacaataaagtcttaaactagacagaatagttgtaaactgaaatcagtccagttatgctgtgaaaaagcatactggacttttgttatggctaaagcaaactcttcattttctgaagtgcaaattgcccgtcgtattaaagaggggcgtggccaagggcatggtaaagactatattcgcggcgttgtgacaatttaccgaacaactccgcggccgggaagccgatctcggcttgaacgaattgttaggtggcggtacttgggtcgatatcaaagtgcatcacttcttcccgtatgcccaactttgtatagagagccactgcgggatcgtcaccgtaatctgcttgcacgtagatcacataagcaccaagcgcgttggcctcatgcttgaggagattgatgagcgcggtggcaatgccctgcctccggtgctcgccggagactgcgagatcatagatatagatctcactacgcggctgctcaaacctgggcagaacgtaagccgcgagagcgccaacaaccgcttcttggtcgaaggcagcaagcgcgatgaatgtcttactacggagcaagttcccgaggtaatcggagtccggctgatgttgggagtaggtggctacgtctccgaactcacgaccgaaaagatcaagagcagcccgcatggatttgacttggtcagggccgagcctacatgtgcgaatgatgcccatacttgagccacctaactttgttttagggcgactgccctgctgcgtaacatcgttgctgctgcgtaacatcgttgctgctccataacatcaaacatcgacccacggcgtaacgcgcttgctgcttggatgcccgaggcatagactgtacaaaaaaacagtcataacaagccatgaaaaccgccactgcgccgttaccaccgctgcgttcggtcaaggttctggaccagttgcgtgagcgcatacgctacttgcattacagtttacgaaccgaacaggcttatgtcaactgggttcgtgccttcatccgtttccacggtgtgcgtcacccggcaaccttgggcagcagcgaagtcgaggcatttctgtcctggctggcgaacgagcgcaaggtttcggtctccacgcatcgtcaggcattggcggccttgctgttcttctacggcaaggtgctgtgcacggatctgccctggcttcaggagatcggaagacctcggccgtcgcggcgcttgccggtggtgctgaccccggatgaagtggttcgcatcctcggttttctggaaggcgagcatcgtttgttcgcccaggactctagctatagttctagtggttggctacgtatactccggaatattaatagatcatggagataattaaaatgataaccatctcgcaaataaataagtattttactgttttcgtaacagttttgtaataaaaaaacctataaatattccggattattcataccgtcccaccatcgggcgcggatctcggtccgaaaccatgtcgtactaccatcaccatcaccatcacgattacgatatcccaacgaccgaaaacctgtattttcagggcgccatgggatcc

SEQ ID NO: 211 - DNA, 10923 bp, synthetic construct
  misc_feature 1..10923: note = Description of Artificial Sequence: Synthetic polynucleotide
  source 1..10923: mol_type = other DNA
ggccggcccctgcaggcagctgcgcgctcgctcgctcactgaggccgcccgggcaaagcccgggcgtcgggcgacctttggtcgcccggcctcagtgagcgagcgagcgcgcagagagggagtggccaactccatcactaggggttccttgtagttaatgattaacccgccatgctacttatctacgtagccatgctctagacgggggaggctgctggtgaatattaaccaaggtcaccccagttatcggaggagcaaacaggggctaagtccacacgcgtggtaccgtctgtctgcacatttcgtagagcgagtgttccgatactctaatctccctaggcaaggttcatatttgtgtaggttacttattctccttttgttgactaagtcaataatcagaatcagcaggtttggagtcagcttggcagggatcagcagcctgggttggaaggagggggtataaaagccccttcaccaggagaagccgtcacacagatccacaagctcctgaagaggtaagggtttaagggatggttggttggtggggtattaatgtttaattacctggagcacctgcctgaaatcactttttttcaggttggtttaaacgccgccaccatgcagattgagctgagcacctgcttcttcctgtgcctgctgaggttctgcttctctgccaccaggagatactacctgggggctgtggagctgagctgggactacatgcagtctgacctgggggagctgcctgtggatgccaggttcccccccagagtgcccaagagcttccccttcaacacctctgtggtgtacaagaagaccctgtttgtggagttcactgaccacctgttcaacattgccaagcccaggcccccctggatgggcctgctgggccccaccatccaggctgaggtgtatgacactgtggtgatcaccctgaagaacatggccagccaccctgtgagcctgcatgctgtgggggtgagctactggaaggcctctgagggggctgagtatgatgaccagaccagccagagggagaaggaggatgacaaggtgttccctgggggcagccacacctatgtgtggcaggtgctgaaggagaatggccccatggcctctgaccccctgtgcctgacctacagctacctgagccatgtggacctggtgaaggacctgaactctggcctgattggggccctgctggtgtgcagggagggcagcctggccaaggagaagacccagaccctgcacaagttcatcctgctgtttgctgtgtttgatgagggcaagagctggcactctgaaaccaagaacagcctgatgcaggacagggatgctgcctctgccagggcctggcccaagatgcacactgtgaatggctatgtgaacaggagcctgcctggcctgattggctgccacaggaagtctgtgtactggcatgtgattggcatgggcaccacccctgaggtgcacagcatcttcctggagggccacaccttcctggtcaggaaccacaggcaggccagcctggagatcagccccatcaccttcctgactgcccagaccctgctgatggacctgggccagttcctgctgttctgccacatcagcagccaccagcatgatggcatggaggcctatgtgaaggtggacagctgccctgaggagccccagctgaggatgaagaacaatgaggaggctgaggactatgatgatgacctgactgactctgagatggatgtggtgaggtttgatgatgacaacagccccagcttcatccagatcaggtctgtggccaagaagcaccccaagacctgggtgcactacattgctgctgaggaggaggactgggactatgcccccctggtgctggcccctgatgacaggagctacaagagccagtacctgaacaatggcccccagaggattggcaggaagtacaagaaggtcaggttcatggcctacactgatgaaaccttcaagaccagggaggccatccagcatgagtctggcatcctgggccccctgctgtatggggaggtgggggacaccctgctgatcatcttcaagaaccaggccagcaggccctacaacatctacccccatggcatcactgatgtgaggcccctgtacagcaggaggctgcccaagggggtgaagcacctgaaggacttccccatcctgcctggggagatcttcaagtacaagtggactgtgactgtggaggatggccccaccaagtctgaccccaggtgcctgaccagatactacagcagctttgtgaacatggagagggacctggcctctggcctgattggccccctgctgatctgctacaaggagtctgtggaccagaggggcaaccagatcatgtctgacaagaggaatgtgatcctgttctctgtgtttgatgagaacaggagctggtacctgactgagaacatccagaggttcctgcccaaccctgctggggtgcagctggaggaccctgagttccaggccagcaacatcatgcacagcatcaatggctatgtgtttgacagcctgcagctgtctgtgtgcctgcatgaggtggcctactggtacatcctgagcattggggcccagactgacttcctgtctgtgttcttctctggctacaccttcaagcacaagatggtgtatgaggacaccctgaccctgttccccttctctggggagactgtgttcatgagcatggagaaccctggcctgtggattctgggctgccacaactctgacttcaggaacaggggcatgactgccctgctgaaagtctccagctgtgacaagaacactggggactactatgaggacagctatgaggacatctctgcctacctgctgagcaagaacaatgccattgagcccaggagcttcagccagaatgccactaatgtgtctaacaacagcaacaccagcaatgacagcaatgtgtctcccccagtgctgaagaggcaccagagggagatcaccaggaccaccctgcagtctgaccaggaggagattgactatgatgacaccatctctgtggagatgaagaaggaggactttgacatctacgacgaggacgagaaccagagccccaggagcttccagaagaagaccaggcactacttcattgctgctgtggagaggctgtgggactatggcatgagcagcagcccccatgtgctgaggaacagggcccagtctggctctgtgccccagttcaagaaggtggtgttccaggagttcactgatggcagcttcacccagcccctgtacagaggggagctgaatgagcacctgggcctgctgggcccctacatcagggctgaggtggaggacaacatcatggtgaccttcaggaaccaggccagcaggccctacagcttctacagcagcctgatcagctatgaggaggaccagaggcagggggctgagcccaggaagaactttgtgaagcccaatgaaaccaagacctacttctggaaggtgcagcaccacatggcccccaccaaggatgagtttgactgcaaggcctgggcctacttctctgatgtggacctggagaaggatgtgcactctggcctgattggccccctgctggtgtgccacaccaacaccctgaaccctgcccatggcaggcaggtgactgtgcaggagtttgccctgttcttcaccatctttgatgaaaccaagagctggtacttcactgagaacatggagaggaactgcagggccccctgcaacatccagatggaggaccccaccttcaaggagaactacaggttccatgccatcaatggctacatcatggacaccctgcctggcctggtgatggcccaggaccagaggatcaggtggtacctgctgagcatgggcagcaatgagaacatccacagcatccacttctctggccatgtgttcactgtgaggaagaaggaggagtacaagatggccctgtacaacctgtaccctggggtgtttgagactgtggagatgctgcccagcaaggctggcatctggagggtggagtgcctgattggggagcacctgcatgctggcatgagcaccctgttcctggtgtacagcaacaagtgccagacccccctgggcatggcctctggccacatcagggacttccagatcactgcctctggccagtatggccagtgggcccccaagctggccaggctgcactactctggcagcatcaatgcctggagcaccaaggagcccttcagctggatcaaggtggacctgctggcccccatgatcatccatggcatcaagacccagggggccaggcagaagttcagcagcctgtacatcagccagttcatcatcatgtacagcctggatggcaagaagtggcagacctacaggggcaacagcactggcaccctgatggtgttctttggcaatgtggacagctctggcatcaagcacaacatcttcaacccccccatcattgccagatacatcaggctgcaccccacccactacagcatcaggagcaccctgaggatggagctgatgggctgtgacctgaacagctgcagcatgcccctgggcatggagagcaaggccatctctgatgcccagatcactgccagcagctacttcaccaacatgtttgccacctggagccccagcaaggccaggctgcacctgcagggcaggagcaatgcctggaggccccaggtcaacaaccccaaggagtggctgcaggtggacttccagaagaccatgaaggtgactggggtgaccacccagggggtgaagagcctgctgaccagcatgtatgtgaaggagttcctgatcagcagcagccaggatggccaccagtggaccctgttcttccagaatggcaaggtgaaggtgttccagggcaaccaggacagcttcacccctgtggtgaacagcctggacccccccctgctgaccagatacctgaggattcacccccagagctgggtgcaccagattgccctgaggatggaggtgctgggctgtgaggcccaggacctgtactgattaattaagagcatcttaccgccatttattcccatatttgttctgtttttcttgatttgggtatacatttaaatgttaataaaacaaaatggtggggcaatcatttacatttttagggatatgtaattactagttcaggtgtattgccacaagacaaacatgttaagaaactttcccgttatttacgctctgttcctgttaatcaacctctggattacaaaatttgtgaaagattgactgatattcttaactatgttgctccttttacgctgtgtggatatgctgctttatagcctctgtatctagctattgcttcccgtacggctttcgttttctcctccttgtataaatcctggttgctgtctcttttagaggagttgtggcccgttgtccgtcaacgtggcgtggtgtgctctgtgtttgctgacgcaacccccactggctggggcattgccaccacctgtcaactcctttctgggactttcgctttccccctcccgatcgccacggcagaactcatcgccgcctgccttgcccgctgctggacaggggctaggttgctgggcactgataattccgtggtgttgtctccataaagtaggaaacactacacgattccataaagtaggaaacactacatcactccataaagtaggaaacactacatgtgccttctagttgccagccatctgttgtttgcccctcccccgtgccttccttgaccctggaaggtgccactcccactgtcctttcctaataaaatgaggaaattgcatcgcattgtctgagtaggtgtcattctattctggggggtggggtggggcaggacagcaagggggaggattgggaagacaatagcaggcatgctggggatgcggtgggctctatggctctagagcatggctacgtagataagtagcatggcgggttaatcattaactacacctgcaggaggaacccctagtgatggagttggccactccctctctgcgcgctcgctcgctcactgaggccgggcgaccaaaggtcgcccgacgcccgggcggcctcagtgagcgagcgagcgcgcagctgcctgcaggggcgcgcctcgaggcatgcggtaccaagcttgtcgagaagtactagaggatcataatcagccataccacatttgtagaggttttacttgctttaaaaaacctcccacacctccccctgaacctgaaacataaaatgaatgcaattgttgttgttaacttgtttattgcagcttataatggttacaaataaagcaatagcatcacaaatttcacaaataaagcatttttttcactgcattctagttgtggtttgtccaaactcatcaatgtatcttatcatgtctggatctgatcactgatatcgcctaggagatccgaaccagataagtgaaatctagttccaaactattttgtcatttttaattttcgtattagcttacgacgctacacccagttcccatctattttgtcactcttccctaaataatccttaaaaactccatttccacccctcccagttcccaactattttgtccgcccacagcggggcatttttcttcctgttatgtttttaatcaaacatcctgccaactccatgtgacaaaccgtcatcttcggctactttttctctgtcacagaatgaaaatttttctgtcatctcttcgttattaatgtttgtaattgactgaatatcaacgcttatttgcagcctgaatggcgaatgggacgcgccctgtagcggcgcattaagcgcggcgggtgtggtggttacgcgcagcgtgaccgctacacttgccagcgccctagcgcccgctcctttcgctttcttcccttcctttctcgccacgttcgccggctttccccgtcaagctctaaatcgggggctccctttagggttccgatttagtgctttacggcacctcgaccccaaaaaacttgattagggtgatggttcacgtagtgggccatcgccctgatagacggtttttcgccctttgacgttggagtccacgttctttaatagtggactcttgttccaaactggaacaacactcaaccctatctcggtctattcttttgatttataagggattttgccgatttcggcctattggttaaaaaatgagctgatttaacaaaaatttaacgcgaattttaacaaaatattaacgtttacaatttcaggtggcacttttcggggaaatgtgcgcggaacccctatttgtttatttttctaaatacattcaaatatgtatccgctcatgagacaataaccctgataaatgcttcaataatattgaaaaaggaagagtatgagtattcaacatttccgtgtcgcccttattcccttttttgcggcattttgccttcctgtttttgctcacccagaaacgctggtgaaagtaaaagatgctgaagatcagttgggtgcacgagtgggttacatcgaactggatctcaacagcggtaagatccttgagagttttcgccccgaagaacgttttccaatgatgagcacttttaaagttctgctatgtggcgcggtattatcccgtattgacgccgggcaagagcaactcggtcgccgcatacactattctcagaatgacttggttgagtactcaccagtcacagaaaagcatcttacggatggcatgacagtaagagaattatgcagtgctgccataaccatgagtgataacactgcggccaacttacttctgacaacgatcggaggaccgaaggagctaaccgcttttttgcacaacatgggggatcatgtaactcgccttgatcgttgggaaccggagctgaatgaagccataccaaacgacgagcgtgacaccacgatgcctgtagcaatggcaacaacgttgcgcaaactattaactggcgaactacttactctagcttcccggcaacaattaatagactggatggaggcggataaagttgcaggaccacttctgcgctcggcccttccggctggctggtttattgctgataaatctggagccggtgagcgtgggtctcgcggtatcattgcagcactggggccagatggtaagccctcccgtatcgtagttatctacacgacggggagtcaggcaactatggatgaacgaaatagacagatcgctgagataggtgcctcactgattaagcattggtaactgtcagaccaagtttactcatatatactttagattgatttaaaacttcatttttaatttaaaaggatctaggtgaagatcctttttgataatctcatgaccaaaatcccttaacgtgagttttcgttccactgagcgtcagaccccgtagaaaagatcaaaggatcttcttgagatcctttttttctgcgcgtaatctgctgcttgcaaacaaaaaaaccaccgctaccagcggtggtttgtttgccggatcaagagctaccaactctttttccgaaggtaactggcttcagcagagcgcagataccaaatactgtccttctagtgtagccgtagttaggccaccacttcaagaactctgtagcaccgcctacatacctcgctctgctaatcctgttaccagtggctgctgccagtggcgataagtcgtgtcttaccgggttggactcaagacgatagttaccggataaggcgcagcggtcgggctgaacggggggttcgtgcacacagcccagcttggagcgaacgacctacaccgaactgagatacctacagcgtgagcattgagaaagcgccacgcttcccgaagggagaaaggcggacaggtatccggtaagcggcagggtcggaacaggagagcgcacgagggagcttccagggggaaacgcctggtatctttatagtcctgtcgggtttcgccacctctgacttgagcgtcgatttttgtgatgctcgtcaggggggcggagcctatggaaaaacgccagcaacgcggcctttttacggttcctggccttttgctggccttttgctcacatgttctttcctgcgttatcccctgattctgtggataaccgtattaccgcctttgagtgagctgataccgctcgccgcagccgaacgaccgagcgcagcgagtcagtgagcgaggaagcggaagagcgcctgatgcggtattttctccttacgcatctgtgcggtatttcacaccgcagaccagccgcgtaacctggcaaaatcggttacggttgagtaataaatggatgccctgcgtaagcgggtgtgggcggacaataaagtcttaaactgaacaaaatagatctaaactatgacaataaagtcttaaactagacagaatagttgtaaactgaaatcagtccagttatgctgtgaaaaagcatactggacttttgttatggctaaagcaaactcttcattttctgaagtgcaaattgcccgtcgtattaaagaggggcgtggccaagggcatggtaaagactatattcgcggcgttgtgacaatttaccgaacaactccgcggccgggaagccgatctcggcttgaacgaattgttaggtggcggtacttgggtcgatatcaaagtgcatcacttcttcccgtatgcccaactttgtatagagagccactgcgggatcgtcaccgtaatctgcttgcacgtagatcacataagcaccaagcgcgttggcctcatgcttgaggagattgatgagcgcggtggcaatgccctgcctccggtgctcgccggagactgcgagatcatagatatagatctcactacgcggctgctcaaacctgggcagaacgtaagccgcgagagcgccaacaaccgcttcttggtcgaaggcagcaagcgcgatgaatgtcttactacggagcaagttcccgaggtaatcggagtccggctgatgttgggagtaggtggctacgtctccgaactcacgaccgaaaagatcaagagcagcccgcatggatttgacttggtcagggccgagcctacatgtgcgaatgatgcccatacttgagccacctaactttgttttagggcgactgccctgctgcgtaacatcgttgctgctgcgtaacatcgttgctgctccataacatcaaacatcgacccacggcgtaacgcgcttgctgcttggatgcccgaggcatagactgtacaaaaaaacagtcataacaagccatgaaaaccgccactgcgccgttaccaccgctgcgttcggtcaaggttctggaccagttgcgtgagcgcatacgctacttgcattacagtttacgaaccgaacaggcttatgtcaactgggttcgtgccttcatccgtttccacggtgtgcgtcacccggcaaccttgggcagcagcgaagtcgaggcatttctgtcctggctggcgaacgagcgcaaggtttcggtctccacgcatcgtcaggcattggcggccttgctgttcttctacggcaaggtgctgtgcacggatctgccctggcttcaggagatcggaagacctcggccgtcgcggcgcttgccggtggtgctgaccccggatgaagtggttcgcatcctcggttttctggaaggcgagcatcgtttgttcgcccaggactctagctatagttctagtggttggctacgtatactccggaatattaatagatcatggagataattaaaatgataaccatctcgcaaataaataagtattttactgttttcgtaacagttttgtaataaaaaaacctataaatattccggattattcataccgtcccaccatcgggcgcggatctcggtccgaaaccatgtcgtactaccatcaccatcaccatcacgattacgatatcccaacgaccgaaaacctgtattttcagggcgccatgggatcc

SEQ ID NO: 212 - DNA, 12404 bp, synthetic construct
  misc_feature 1..12404: note = Description of Artificial Sequence: Synthetic polynucleotide
  source 1..12404: mol_type = other DNA
ggccggcccctgcaggcagctgcgcgctcgctcgctcactgaggccgcccgggcaaagcccgggcgtcgggcgacctttggtcgcccggcctcagtgagcgagcgagcgcgcagagagggagtggccaactccatcactaggggttccttgtagttaatgattaacccgccatgctacttatctacgtagccatgctctagagcggccgctcaatattggccattagccatattattcattggttatatagcataaatcaatattggctattggccattgcatacgttgtatctatatcataatatgtacatttatattggctcatgtccaatatgaccgccatgttggcattgattattgactagttattaatagtaatcaattacggggtcattagttcatagcccatatatggagttccgcgttacataacttacggtaaatggcccgcctggctgaccgcccaacgacccccgcccattgacgtcaataatgacgtatgttcccatagtaacgccaatagggactttccattgacgtcaatgggtggagtatttacggtaaactgcccacttggcagtacatcaagtgtatcatatgccaagtccgccccctattgacgtcaatgacggtaaatggcccgcctggcattatgcccagtacatgaccttacgggactttcctacttggcagtacatctacgtattagtcatcgctattaccatggtcgaggtgagccccacgttctgcttcactctccccatctcccccccctccccacccccaattttgtatttatttattttttaattattttgtgcagcgatgggggcggggggggggggggggcgcgcgccaggcggggcggggcggggcgaggggcggggcggggcgaggcggagaggtgcggcggcagccaatcagagcggcgcgctccgaaagtttccttttatggcgaggcggcggcggcggcggccctataaaaagcgaagcgcgcggcgggcgggagtcgctgcgacgctgccttcgccccgtgccccgctccgccgccgcctcgcgccgcccgccccggctctgactgaccgcgttactcccacaggtgagcgggcgggacggcccttctcctccgggctgtaattagcgcttggtttaatgacggcttgtttcttttctgtggctgcgtgaaagccttgaggggctccgggagggccctttgtgcgggggggagcggctcggggggtgcgtgcgtgtgtgtgtgcgtggggagcgccgcgtgcggcccgcgctgcccggcggctgtgagcgctgcgggcgcggcgcggggctttgtgcgctccgcagtgtgcgcgaggggagcgcggccgggggcggtgccccgcggtgcggggggggctgcgaggggaacaaaggctgcgtgcggggtgtgtgcgtgggggggtgagcagggggtgtgggcgcggcggtcgggctgtaacccccccctgcacccccctccccgagttgctgagcacggcccggcttcgggtgcggggctccgtacggggcgtggcgcggggctcgccgtgccgggcggggggtggcggcaggtgggggtgccgggcggggcggggccgcctcgggccggggagggctcgggggaggggcgcggcggcccccggagcgccggcggctgtcgaggcgcggcgagccgcagccattgccttttatggtaatcgtgcgagagggcgcagggacttcctttgtcccaaatctgtgcggagccgaaatctgggaggcgccgccgcaccccctctagcgggcgcggggcgaagcggtgcggcgccggcaggaaggaaatgggcggggagggccttcgtgcgtcgccgcgccgccgtccccttctccctctccagcctcggggctgtccgcggggggacggctgccttcgggggggacggggcagggcggggttcggcttctggcgtgtgaccggcggctctagagcctctgctaaccatgttttagccttcttctttttcctacagctcctgggcaacgtgctggttattgtgctgtctcatcatttgtcgacagaattcctcgaagatccgaaggggttcaagcttggcattccggtactgttggtaaagccagtttaaacgccgccaccatgcagatcgagctgtctacctgcttcttcctgtgcctgctgcggttctgcttcagcgccaccagaagatattacctgggcgccgtggaactgagctgggactacatgcagtctgacctgggagagctgcccgtggacgctagatttcctccaagagtgcccaagagcttccccttcaacacctccgtggtgtacaagaaaaccctgttcgtggaattcaccgaccacctgttcaatatcgccaagcctcggcctccttggatgggactgctgggacctacaattcaggccgaggtgtacgacaccgtggtcatcaccctgaagaacatggccagccatcctgtgtctctgcacgccgtgggagtgtcttattggaaggcttctgagggcgccgagtacgacgatcagacaagccagagagagaaagaggacgacaaggttttccctggcggcagccacacctatgtctggcaggtcctgaaagaaaacggccctatggcctccgatcctctgtgcctgacatacagctacctgagccacgtggacctggtcaaggacctgaattctggcctgatcggagccctgctcgtgtgtagagaaggcagcctggccaaagagaaaacccagacactgcacaagttcatcctgctgttcgccgtgttcgacgagggcaagagctggcacagcgagacaaagaacagcctgatgcaggacagggatgccgcctctgctagagcttggcctaagatgcacaccgtgaacggctacgtgaacagaagcctgcctggactgatcggctgccacagaaagtccgtgtactggcacgtgatcggcatgggcacaacacctgaggtgcacagcatctttctggaaggccacaccttcctcgtgcggaaccacagacaggccagcctggaaatcagccctatcaccttcctgaccgctcagaccctgctgatggatctgggccagtttctgctgttctgccacatcagctcccaccagcacgatggcatggaagcctacgtgaaggtggacagctgccccgaagaaccccagctgcggatgaagaacaacgaggaagccgaggactacgacgacgacctgaccgactctgagatggacgtcgtcagattcgacgacgataacagccccagcttcatccagatcagaagcgtggccaagaagcaccccaagacctgggtgcactatatcgccgccgaggaagaggactgggattacgctcctctggtgctggcccctgacgacagaagctacaagagccagtacctgaacaacggccctcagcggatcggccggaagtataagaaagtgcggttcatggcctacaccgacgagacattcaagaccagagaggccatccagcacgagagcggaattctgggccctctgctgtatggcgaagtgggcgatacactgctgatcatcttcaagaaccaggccagcagaccctacaacatctaccctcacggcatcaccgatgtgcggcccctgtattctagaaggctgcccaagggcgtgaagcacctgaaggacttccctatcctgcctggcgagattttcaagtacaagtggaccgtgaccgtggaagatggccccaccaagagcgaccctagatgtctgacacggtactacagcagcttcgtgaacatggaacgcgacctggccagcggcctgattggacctctgctgatctgctacaaagaaagcgtggaccagcggggcaaccagatcatgagcgacaagcggaacgtgatcctgtttagcgtgttcgatgagaaccggtcctggtatctgaccgagaacatccagcggtttctgcccaatcctgccggggtgcaactggaagatcctgagttccaggcaagcaacatcatgcactccatcaatggctatgtgttcgacagcctgcagctgagcgtgtgcctgcacgaagtggcctactggtacatcctgagcattggcgcccagaccgacttcctgtccgtgttctttagcggctacaccttcaagcacaagatggtgtacgaggataccctgacactgttcccattcagcggcgagacagtgttcatgagcatggaaaaccccggcctgtggattctgggctgtcacaacagcgacttccggaacagaggcatgacagccctgctgaaggtgtccagctgcgacaagaacaccggcgactactacgaggacagctatgaggacatcagcgcctacctgctgagcaagaacaatgccatcgagcctcggagcttcagccagaatcctcctgtgctgaagcggcaccagcgcgagatcaccagaacaaccctgcagagcgaccaagaggaaatcgattacgacgacaccatcagcgtcgagatgaagaaagaagatttcgacatctacgacgaggacgagaatcagagccccagaagctttcagaaaaagacccggcactacttcattgccgccgtcgagagactgtgggactacggcatgtctagcagccctcacgtgctgagaaatagagcccagagcggcagcgtgccccagttcaagaaagtggtgttccaagagttcaccgacggcagcttcacccagccactgtatagaggcgagctgaacgagcatctgggcctgctgggcccttatatcagagccgaagtggaagataacatcatggtcaccttccggaatcaggctagccggccttacagcttctacagctccctgatcagctacgaagaggaccagagacagggcgctgagcccagaaagaacttcgtgaagcccaacgagactaagacctacttttggaaggtgcagcaccacatggcccctacaaaggacgagttcgactgcaaagcctgggcctacttctccgatgtggatctggaaaaggacgtgcacagcgggctcatcggaccactgcttgtgtgccacaccaacacactgaaccccgctcacggcagacaagtgacagtgcaagagttcgccctgttcttcaccatcttcgacgaaacaaagagctggtacttcaccgagaatatggaacggaactgcagagccccttgcaacatccagatggaagatcccaccttcaaagagaactaccggttccacgccatcaacggctacatcatggacacactgcccggcctggttatggcccaggatcagagaatccggtggtatctgctgtccatgggctccaacgagaatatccacagcatccacttcagcggccacgtgttcaccgtgcggaaaaaagaagagtacaaaatggccctgtacaatctgtaccctggggtgttcgaaaccgtggaaatgctgccttccaaggccggcatttggagagtggaatgtctgattggagagcacctccacgccggaatgagcaccctgtttctggtgtacagcaacaagtgtcagacccctctcggcatggcctctggacacatcagagacttccagatcaccgcctctggccagtacggacagtgggctcctaaactggctcggctgcactacagcggcagcatcaatgcctggtccaccaaagagcccttcagctggatcaaggtggacctgctggctcccatgatcatccacggaatcaagacccagggcgccagacagaagttcagcagcctgtacatcagccagttcatcatcatgtacagcctggacggcaagaagtggcagacctacagaggcaacagcaccggcacactcatggtgttcttcggcaacgtggactccagcggcattaagcacaacatcttcaaccctccaatcattgcccggtacatccggctgcaccccacacactacagcatccggtctaccctgagaatggaactgatgggctgcgacctgaacagctgctctatgcccctcggaatggaaagcaaggccatcagcgacgcccagatcacagccagcagctacttcaccaacatgttcgccacttggagcccctccaaggctagactgcatctgcagggcagaagcaacgcttggaggccccaagtgaacaaccccaaagagtggctgcaggttgactttcaaaagaccatgaaagtgaccggcgtgaccacacagggcgtcaagtctctgctgacctctatgtacgtgaaagagttcctgatctccagcagccaggacggccatcagtggaccctgtttttccagaacggcaaagtgaaagtgttccagggcaatcaggacagcttcacacccgtggtcaattctctggaccctccactgctgaccagatacctgcggattcaccctcagtcttgggtgcaccagatcgctctgcggatggaagtgctgggctgtgaagctcaggacctctactagttaattaagagcatcttaccgccatttattcccatatttgttctgtttttcttgatttgggtatacatttaaatgttaataaaacaaaatggtggggcaatcatttacatttttagggatatgtaattactagttcaggtgtattgccacaagacaaacatgttaagaaactttcccgttatttacgctctgttcctgttaatcaacctctggattacaaaatttgtgaaagattgactgatattcttaactatgttgctccttttacgctgtgtggatatgctgctttatagcctctgtatctagctattgcttcccgtacggctttcgttttctcctccttgtataaatcctggttgctgtctcttttagaggagttgtggcccgttgtccgtcaacgtggcgtggtgtgctctgtgtttgctgacgcaacccccactggctggggcattgccaccacctgtcaactcctttctgggactttcgctttccccctcccgatcgccacggcagaactcatcgccgcctgccttgcccgctgctggacaggggctaggttgctgggcactgataattccgtggtgttgtctccataaagtaggaaacactacacgattccataaagtaggaaacactacatcactccataaagtaggaaacactacatgtgccttctagttgccagccatctgttgtttgcccctcccccgtgccttccttgaccctggaaggtgccactcccactgtcctttcctaataaaatgaggaaattgcatcgcattgtctgagtaggtgtcattctattctggggggtggggtggggcaggacagcaagggggaggattgggaagacaatagcaggcatgctggggatgcggtgggctctatggctctagagcatggctacgtagataagtagcatggcgggttaatcattaactacacctgcaggaggaacccctagtgatggagttggccactccctctctgcgcgctcgctcgctcactgaggccgggcgaccaaaggtcgcccgacgcccgggcggcctcagtgagcgagcgagcgcgcagctgcctgcaggggcgcgcctcgaggcatgcggtaccaagcttgtcgagaagtactagaggatcataatcagccataccacatttgtagaggttttacttgctttaaaaaacctcccacacctccccctgaacctgaaacataaaatgaatgcaattgttgttgttaacttgtttattgcagcttataatggttacaaataaagcaatagcatcacaaatttcacaaataaagcatttttttcactgcattctagttgtggtttgtccaaactcatcaatgtatcttatcatgtctggatctgatcactgatatcgcctaggagatccgaaccagataagtgaaatctagttccaaactattttgtcatttttaattttcgtattagcttacgacgctacacccagttcccatctattttgtcactcttccctaaataatccttaaaaactccatttccacccctcccagttcccaactattttgtccgcccacagcggggcatttttcttcctgttatgtttttaatcaaacatcctgccaactccatgtgacaaaccgtcatcttcggctactttttctctgtcacagaatgaaaatttttctgtcatctcttcgttattaatgtttgtaattgactgaatatcaacgcttatttgcagcctgaatggcgaatgggacgcgccctgtagcggcgcattaagcgcggcgggtgtggtggttacgcgcagcgtgaccgctacacttgccagcgccctagcgcccgctcctttcgctttcttcccttcctttctcgccacgttcgccggctttccccgtcaagctctaaatcgggggctccctttagggttccgatttagtgctttacggcacctcgaccccaaaaaacttgattagggtgatggttcacgtagtgggccatcgccctgatagacggtttttcgccctttgacgttggagtccacgttctttaatagtggactcttgttccaaactggaacaacactcaaccctatctcggtctattcttttgatttataagggattttgccgatttcggcctattggttaaaaaatgagctgatttaacaaaaatttaacgcgaattttaacaaaatattaacgtttacaatttcaggtggcacttttcggggaaatgtgcgcggaacccctatttgtttatttttctaaatacattcaaatatgtatccgctcatgagacaataaccctgataaatgcttcaataatattgaaaaaggaagagtatgagtattcaacatttccgtgtcgcccttattcccttttttgcggcattttgccttcctgtttttgctcacccagaaacgctggtgaaagtaaaagatgctgaagatcagttgggtgcacgagtgggttacatcgaactggatctcaacagcggtaagatccttgagagttttcgccccgaagaacgttttccaatgatgagcacttttaaagttctgctatgtggcgcggtattatcccgtattgacgccgggcaagagcaactcggtcgccgcatacactattctcagaatgacttggttgagtactcaccagtcacagaaaagcatcttacggatggcatgacagtaagagaattatgcagtgctgccataaccatgagtgataacactgcggccaacttacttctgacaacgatcggaggaccgaaggagctaaccgcttttttgcacaacatgggggatcatgtaactcgccttgatcgttgggaaccggagctgaatgaagccataccaaacgacgagcgtgacaccacgatgcctgtagcaatggcaacaacgttgcgcaaactattaactggcgaactacttactctagcttcccggcaacaattaatagactggatggaggcggataaagttgcaggaccacttctgcgctcggcccttccggctggctggtttattgctgataaatctggagccggtgagcgtgggtctcgcggtatcattgcagcactggggccagatggtaagccctcccgtatcgtagttatctacacgacggggagtcaggcaactatggatgaacgaaatagacagatcgctgagataggtgcctcactgattaagcattggtaactgtcagaccaagtttactcatatatactttagattgatttaaaacttcatttttaatttaaaaggatctaggtgaagatcctttttgataatctcatgaccaaaatcccttaacgtgagttttcgttccactgagcgtcagaccccgtagaaaagatcaaaggatcttcttgagatcctttttttctgcgcgtaatctgctgcttgcaaacaaaaaaaccaccgctaccagcggtggtttgtttgccggatcaagagctaccaactctttttccgaaggtaactggcttcagcagagcgcagataccaaatactgtccttctagtgtagccgtagttaggccaccacttcaagaactctgtagcaccgcctacatacctcgctctgctaatcctgttaccagtggctgctgccagtggcgataagtcgtgtcttaccgggttggactcaagacgatagttaccggataaggcgcagcggtcgggctgaacggggggttcgtgcacacagcccagcttggagcgaacgacctacaccgaactgagatacctacagcgtgagcattgagaaagcgccacgcttcccgaagggagaaaggcggacaggtatccggtaagcggcagggtcggaacaggagagcgcacgagggagcttccagggggaaacgcctggtatctttatagtcctgtcgggtttcgccacctctgacttgagcgtcgatttttgtgatgctcgtcaggggggcggagcctatggaaaaacgccagcaacgcggcctttttacggttcctggccttttgctggccttttgctcacatgttctttcctgcgttatcccctgattctgtggataaccgtattaccgcctttgagtgagctgataccgctcgccgcagccgaacgaccgagcgcagcgagtcagtgagcgaggaagcggaagagcgcctgatgcggtattttctccttacgcatctgtgcggtatttcacaccgcagaccagccgcgtaacctggcaaaatcggttacggttgagtaataaatggatgccctgcgtaagcgggtgtgggcggacaataaagtcttaaactgaacaaaatagatctaaactatgacaataaagtcttaaactagacagaatagttgtaaactgaaatcagtccagttatgctgtgaaaaagcatactggacttttgttatggctaaagcaaactcttcattttctgaagtgcaaattgcccgtcgtattaaagaggggcgtggccaagggcatggtaaagactatattcgcggcgttgtgacaatttaccgaacaactccgcggccgggaagccgatctcggcttgaacgaattgttaggtggcggtacttgggtcgatatcaaagtgcatcacttcttcccgtatgcccaactttgtatagagagccactgcgggatcgtcaccgtaatctgcttgcacgtagatcacataagcaccaagcgcgttggcctcatgcttgaggagattgatgagcgcggtggcaatgccctgcctccggtgctcgccggagactgcgagatcatagatatagatctcactacgcggctgctcaaacctgggcagaacgtaagccgcgagagcgccaacaaccgcttcttggtcgaaggcagcaagcgcgatgaatgtcttactacggagcaagttcccgaggtaatcggagtccggctgatgttgggagtaggtggctacgtctccgaactcacgaccgaaaagatcaagagcagcccgcatggatttgacttggtcagggccgagcctacatgtgcgaatgatgcccatacttgagccacctaactttgttttagggcgactgccctgctgcgtaacatcgttgctgctgcgtaacatcgttgctgctccataacatcaaacatcgacccacggcgtaacgcgcttgctgcttggatgcccgaggcatagactgtacaaaaaaacagtcataacaagccatgaaaaccgccactgcgccgttaccaccgctgcgttcggtcaaggttctggaccagttgcgtgagcgcatacgctacttgcattacagtttacgaaccgaacaggcttatgtcaactgggttcgtgccttcatccgtttccacggtgtgcgtcacccggcaaccttgggcagcagcgaagtcgaggcatttctgtcctggctggcgaacgagcgcaaggtttcggtctccacgcatcgtcaggcattggcggccttgctgttcttctacggcaaggtgctgtgcacggatctgccctggcttcaggagatcggaagacctcggccgtcgcggcgcttgccggtggtgctgaccccggatgaagtggttcgcatcctcggttttctggaaggcgagcatcgtttgttcgcccaggactctagctatagttctagtggttggctacgtatactccggaatattaatagatcatggagataattaaaatgataaccatctcgcaaataaataagtattttactgttttcgtaacagttttgtaataaaaaaacctataaatattccggattattcataccgtcccaccatcgggcgcggatctcggtccgaaaccatgtcgtactaccatcaccatcaccatcacgattacgatatcccaacgaccgaaaacctgtattttcagggcgccatgggatcc

SEQ ID NO: 213 - DNA, 11356 bp, synthetic construct
  misc_feature 1..11356: note = Description of Artificial Sequence: Synthetic polynucleotide
  source 1..11356: mol_type = other DNA
ggccggcccctgcaggcagctgcgcgctcgctcgctcactgaggccgcccgggcaaagcccgggcgtcgggcgacctttggtcgcccggcctcagtgagcgagcgagcgcgcagagagggagtggccaactccatcactaggggttccttgtagttaatgattaacccgccatgctacttatctacgtagccatgctctagagagtcaatgggaaaaacccattggagccaagtacactgactcaatagggactttccattgggttttgcccagtacataaggtcaatagggggtgagtcaacaggaaagtcccattggagccaagtacattgagtcaatagggactttccaatgggttttgcccagtacataaggtcaatgggaggtaagccaatgggtttttcccattactgacatgtatactgagtcattagggactttccaatgggttttgcccagtacataaggtcaataggggtgaatcaacaggaaagtcccattggagccaagtacactgagtcaatagggactttccattgggttttgcccagtacaaaaggtcaatagggggtgagtcaatgggtttttcccattattggcacatacataaggtcaataggggtgactagtggagaagagcatgcttgagggctgagtgcccctcagtgggcagagagcacatggcccacagtccctgagaagttggggggaggggtgggcaattgaactggtgcctagagaaggtggggcttgggtaaactgggaaagtgatgtggtgtactggctccacctttttccccagggtgggggagaaccatatataagtgcagtagtctctgtgaacattcaagcttctgccttctccctcctgtgagtttggtaagtcactgactgtctatgcctgggaaagggtgggcaggagatggggcagtgcaggaaaagtggcactatgaaccctgcagccctagacaattgtactaaccttcttctctttcctctcctgacaggttggtgtacagtagcttccgtttaaacgccgccaccatgcagattgagctgagcacctgcttcttcctgtgcctgctgaggttctgcttctctgccaccaggagatactacctgggggctgtggagctgagctgggactacatgcagtctgacctgggggagctgcctgtggatgccaggttcccccccagagtgcccaagagcttccccttcaacacctctgtggtgtacaagaagaccctgtttgtggagttcactgaccacctgttcaacattgccaagcccaggcccccctggatgggcctgctgggccccaccatccaggctgaggtgtatgacactgtggtgatcaccctgaagaacatggccagccaccctgtgagcctgcatgctgtgggggtgagctactggaaggcctctgagggggctgagtatgatgaccagaccagccagagggagaaggaggatgacaaggtgttccctgggggcagccacacctatgtgtggcaggtgctgaaggagaatggccccatggcctctgaccccctgtgcctgacctacagctacctgagccatgtggacctggtgaaggacctgaactctggcctgattggggccctgctggtgtgcagggagggcagcctggccaaggagaagacccagaccctgcacaagttcatcctgctgtttgctgtgtttgatgagggcaagagctggcactctgaaaccaagaacagcctgatgcaggacagggatgctgcctctgccagggcctggcccaagatgcacactgtgaatggctatgtgaacaggagcctgcctggcctgattggctgccacaggaagtctgtgtactggcatgtgattggcatgggcaccacccctgaggtgcacagcatcttcctggagggccacaccttcctggtcaggaaccacaggcaggccagcctggagatcagccccatcaccttcctgactgcccagaccctgctgatggacctgggccagttcctgctgttctgccacatcagcagccaccagcatgatggcatggaggcctatgtgaaggtggacagctgccctgaggagccccagctgaggatgaagaacaatgaggaggctgaggactatgatgatgacctgactgactctgagatggatgtggtgaggtttgatgatgacaacagccccagcttcatccagatcaggtctgtggccaagaagcaccccaagacctgggtgcactacattgctgctgaggaggaggactgggactatgcccccctggtgctggcccctgatgacaggagctacaagagccagtacctgaacaatggcccccagaggattggcaggaagtacaagaaggtcaggttcatggcctacactgatgaaaccttcaagaccagggaggccatccagcatgagtctggcatcctgggccccctgctgtatggggaggtgggggacaccctgctgatcatcttcaagaaccaggccagcaggccctacaacatctacccccatggcatcactgatgtgaggcccctgtacagcaggaggctgcccaagggggtgaagcacctgaaggacttccccatcctgcctggggagatcttcaagtacaagtggactgtgactgtggaggatggccccaccaagtctgaccccaggtgcctgaccagatactacagcagctttgtgaacatggagagggacctggcctctggcctgattggccccctgctgatctgctacaaggagtctgtggaccagaggggcaaccagatcatgtctgacaagaggaatgtgatcctgttctctgtgtttgatgagaacaggagctggtacctgactgagaacatccagaggttcctgcccaaccctgctggggtgcagctggaggaccctgagttccaggccagcaacatcatgcacagcatcaatggctatgtgtttgacagcctgcagctgtctgtgtgcctgcatgaggtggcctactggtacatcctgagcattggggcccagactgacttcctgtctgtgttcttctctggctacaccttcaagcacaagatggtgtatgaggacaccctgaccctgttccccttctctggggagactgtgttcatgagcatggagaaccctggcctgtggattctgggctgccacaactctgacttcaggaacaggggcatgactgccctgctgaaagtctccagctgtgacaagaacactggggactactatgaggacagctatgaggacatctctgcctacctgctgagcaagaacaatgccattgagcccaggagcttcagccagaatgccactaatgtgtctaacaacagcaacaccagcaatgacagcaatgtgtctcccccagtgctgaagaggcaccagagggagatcaccaggaccaccctgcagtctgaccaggaggagattgactatgatgacaccatctctgtggagatgaagaaggaggactttgacatctacgacgaggacgagaaccagagccccaggagcttccagaagaagaccaggcactacttcattgctgctgtggagaggctgtgggactatggcatgagcagcagcccccatgtgctgaggaacagggcccagtctggctctgtgccccagttcaagaaggtggtgttccaggagttcactgatggcagcttcacccagcccctgtacagaggggagctgaatgagcacctgggcctgctgggcccctacatcagggctgaggtggaggacaacatcatggtgaccttcaggaaccaggccagcaggccctacagcttctacagcagcctgatcagctatgaggaggaccagaggcagggggctgagcccaggaagaactttgtgaagcccaatgaaaccaagacctacttctggaaggtgcagcaccacatggcccccaccaaggatgagtttgactgcaaggcctgggcctacttctctgatgtggacctggagaaggatgtgcactctggcctgattggccccctgctggtgtgccacaccaacaccctgaaccctgcccatggcaggcaggtgactgtgcaggagtttgccctgttcttcaccatctttgatgaaaccaagagctggtacttcactgagaacatggagaggaactgcagggccccctgcaacatccagatggaggaccccaccttcaaggagaactacaggttccatgccatcaatggctacatcatggacaccctgcctggcctggtgatggcccaggaccagaggatcaggtggtacctgctgagcatgggcagcaatgagaacatccacagcatccacttctctggccatgtgttcactgtgaggaagaaggaggagtacaagatggccctgtacaacctgtaccctggggtgtttgagactgtggagatgctgcccagcaaggctggcatctggagggtggagtgcctgattggggagcacctgcatgctggcatgagcaccctgttcctggtgtacagcaacaagtgccagacccccctgggcatggcctctggccacatcagggacttccagatcactgcctctggccagtatggccagtgggcccccaagctggccaggctgcactactctggcagcatcaatgcctggagcaccaaggagcccttcagctggatcaaggtggacctgctggcccccatgatcatccatggcatcaagacccagggggccaggcagaagttcagcagcctgtacatcagccagttcatcatcatgtacagcctggatggcaagaagtggcagacctacaggggcaacagcactggcaccctgatggtgttctttggcaatgtggacagctctggcatcaagcacaacatcttcaacccccccatcattgccagatacatcaggctgcaccccacccactacagcatcaggagcaccctgaggatggagctgatgggctgtgacctgaacagctgcagcatgcccctgggcatggagagcaaggccatctctgatgcccagatcactgccagcagctacttcaccaacatgtttgccacctggagccccagcaaggccaggctgcacctgcagggcaggagcaatgcctggaggccccaggtcaacaaccccaaggagtggctgcaggtggacttccagaagaccatgaaggtgactggggtgaccacccagggggtgaagagcctgctgaccagcatgtatgtgaaggagttcctgatcagcagcagccaggatggccaccagtggaccctgttcttccagaatggcaaggtgaaggtgttccagggcaaccaggacagcttcacccctgtggtgaacagcctggacccccccctgctgaccagatacctgaggattcacccccagagctgggtgcaccagattgccctgaggatggaggtgctgggctgtgaggcccaggacctgtactgattaattaagagcatcttaccgccatttattcccatatttgttctgtttttcttgatttgggtatacatttaaatgttaataaaacaaaatggtggggcaatcatttacatttttagggatatgtaattactagttcaggtgtattgccacaagacaaacatgttaagaaactttcccgttatttacgctctgttcctgttaatcaacctctggattacaaaatttgtgaaagattgactgatattcttaactatgttgctccttttacgctgtgtggatatgctgctttatagcctctgtatctagctattgcttcccgtacggctttcgttttctcctccttgtataaatcctggttgctgtctcttttagaggagttgtggcccgttgtccgtcaacgtggcgtggtgtgctctgtgtttgctgacgcaacccccactggctggggcattgccaccacctgtcaactcctttctgggactttcgctttccccctcccgatcgccacggcagaactcatcgccgcctgccttgcccgctgctggacaggggctaggttgctgggcactgataattccgtggtgttgtctccataaagtaggaaacactacacgattccataaagtaggaaacactacatcactccataaagtaggaaacactacatgtgccttctagttgccagccatctgttgtttgcccctcccccgtgccttccttgaccctggaaggtgccactcccactgtcctttcctaataaaatgaggaaattgcatcgcattgtctgagtaggtgtcattctattctggggggtggggtggggcaggacagcaagggggaggattgggaagacaatagcaggcatgctggggatgcggtgggctctatggctctagatctagagcatggctacgtagataagtagcatggcgggttaatcattaactacacctgcaggaggaacccctagtgatggagttggccactccctctctgcgcgctcgctcgctcactgaggccgggcgaccaaaggtcgcccgacgcccgggcggcctcagtgagcgagcgagcgcgcagctgcctgcaggggcgcgcctcgaggcatgcggtaccaagcttgtcgagaagtactagaggatcataatcagccataccacatttgtagaggttttacttgctttaaaaaacctcccacacctccccctgaacctgaaacataaaatgaatgcaattgttgttgttaacttgtttattgcagcttataatggttacaaataaagcaatagcatcacaaatttcacaaataaagcatttttttcactgcattctagttgtggtttgtccaaactcatcaatgtatcttatcatgtctggatctgatcactgatatcgcctaggagatccgaaccagataagtgaaatctagttccaaactattttgtcatttttaattttcgtattagcttacgacgctacacccagttcccatctattttgtcactcttccctaaataatccttaaaaactccatttccacccctcccagttcccaactattttgtccgcccacagcggggcatttttcttcctgttatgtttttaatcaaacatcctgccaactccatgtgacaaaccgtcatcttcggctactttttctctgtcacagaatgaaaatttttctgtcatctcttcgttattaatgtttgtaattgactgaatatcaacgcttatttgcagcctgaatggcgaatgggacgcgccctgtagcggcgcattaagcgcggcgggtgtggtggttacgcgcagcgtgaccgctacacttgccagcgccctagcgcccgctcctttcgctttcttcccttcctttctcgccacgttcgccggctttccccgtcaagctctaaatcgggggctccctttagggttccgatttagtgctttacggcacctcgaccccaaaaaacttgattagggtgatggttcacgtagtgggccatcgccctgatagacggtttttcgccctttgacgttggagtccacgttctttaatagtggactcttgttccaaactggaacaacactcaaccctatctcggtctattcttttgatttataagggattttgccgatttcggcctattggttaaaaaatgagctgatttaacaaaaatttaacgcgaattttaacaaaatattaacgtttacaatttcaggtggcacttttcggggaaatgtgcgcggaacccctatttgtttatttttctaaatacattcaaatatgtatccgctcatgagacaataaccctgataaatgcttcaataatattgaaaaaggaagagtatgagtattcaacatttccgtgtcgcccttattcccttttttgcggcattttgccttcctgtttttgctcacccagaaacgctggtgaaagtaaaagatgctgaagatcagttgggtgcacgagtgggttacatcgaactggatctcaacagcggtaagatccttgagagttttcgccccgaagaacgttttccaatgatgagcacttttaaagttctgctatgtggcgcggtattatcccgtattgacgccgggcaagagcaactcggtcgccgcatacactattctcagaatgacttggttgagtactcaccagtcacagaaaagcatcttacggatggcatgacagtaagagaattatgcagtgctgccataaccatgagtgataacactgcggccaacttacttctgacaacgatcggaggaccgaaggagctaaccgcttttttgcacaacatgggggatcatgtaactcgccttgatcgttgggaaccggagctgaatgaagccataccaaacgacgagcgtgacaccacgatgcctgtagcaatggcaacaacgttgcgcaaactattaactggcgaactacttactctagcttcccggcaacaattaatagactggatggaggcggataaagttgcaggaccacttctgcgctcggcccttccggctggctggtttattgctgataaatctggagccggtgagcgtgggtctcgcggtatcattgcagcactggggccagatggtaagccctcccgtatcgtagttatctacacgacggggagtcaggcaactatggatgaacgaaatagacagatcgctgagataggtgcctcactgattaagcattggtaactgtcagaccaagtttactcatatatactttagattgatttaaaacttcatttttaatttaaaaggatctaggtgaagatcctttttgataatctcatgaccaaaatcccttaacgtgagttttcgttccactgagcgtcagaccccgtagaaaagatcaaaggatcttcttgagatcctttttttctgcgcgtaatctgctgcttgcaaacaaaaaaaccaccgctaccagcggtggtttgtttgccggatcaagagctaccaactctttttccgaaggtaactggcttcagcagagcgcagataccaaatactgtccttctagtgtagccgtagttaggccaccacttcaagaactctgtagcaccgcctacatacctcgctctgctaatcctgttaccagtggctgctgccagtggcgataagtcgtgtcttaccgggttggactcaagacgatagttaccggataaggcgcagcggtcgggctgaacggggggttcgtgcacacagcccagcttggagcgaacgacctacaccgaactgagatacctacagcgtgagcattgagaaagcgccacgcttcccgaagggagaaaggcggacaggtatccggtaagcggcagggtcggaacaggagagcgcacgagggagcttccagggggaaacgcctggtatctttatagtcctgtcgggtttcgccacctctgacttgagcgtcgatttttgtgatgctcgtcaggggggcggagcctatggaaaaacgccagcaacgcggcctttttacggttcctggccttttgctggccttttgctcacatgttctttcctgcgttatcccctgattctgtggataaccgtattaccgcctttgagtgagctgataccgctcgccgcagccgaacgaccgagcgcagcgagtcagtgagcgaggaagcggaagagcgcctgatgcggtattttctccttacgcatctgtgcggtatttcacaccgcagaccagccgcgtaacctggcaaaatcggttacggttgagtaataaatggatgccctgcgtaagcgggtgtgggcggacaataaagtcttaaactgaacaaaatagatctaaactatgacaataaagtcttaaactagacagaatagttgtaaactgaaatcagtccagttatgctgtgaaaaagcatactggacttttgttatggctaaagcaaactcttcattttctgaagtgcaaattgcccgtcgtattaaagaggggcgtggccaagggcatggtaaagactatattcgcggcgttgtgacaatttaccgaacaactccgcggccgggaagccgatctcggcttgaacgaattgttaggtggcggtacttgggtcgatatcaaagtgcatcacttcttcccgtatgcccaactttgtatagagagccactgcgggatcgtcaccgtaatctgcttgcacgtagatcacataagcaccaagcgcgttggcctcatgcttgaggagattgatgagcgcggtggcaatgccctgcctccggtgctcgccggagactgcgagatcatagatatagatctcactacgcggctgctcaaacctgggcagaacgtaagccgcgagagcgccaacaaccgcttcttggtcgaaggcagcaagcgcgatgaatgtcttactacggagcaagttcccgaggtaatcggagtccggctgatgttgggagtaggtggctacgtctccgaactcacgaccgaaaagatcaagagcagcccgcatggatttgacttggtcagggccgagcctacatgtgcgaatgatgcccatacttgagccacctaactttgttttagggcgactgccctgctgcgtaacatcgttgctgctgcgtaacatcgttgctgctccataacatcaaacatcgacccacggcgtaacgcgcttgctgcttggatgcccgaggcatagactgtacaaaaaaacagtcataacaagccatgaaaaccgccactgcgccgttaccaccgctgcgttcggtcaaggttctggaccagttgcgtgagcgcatacgctacttgcattacagtttacgaaccgaacaggcttatgtcaactgggttcgtgccttcatccgtttccacggtgtgcgtcacccggcaaccttgggcagcagcgaagtcgaggcatttctgtcctggctggcgaacgagcgcaaggtttcggtctccacgcatcgtcaggcattggcggccttgctgttcttctacggcaaggtgctgtgcacggatctgccctggcttcaggagatcggaagacctcggccgtcgcggcgcttgccggtggtgctgaccccggatgaagtggttcgcatcctcggttttctggaaggcgagcatcgtttgttcgcccaggactctagctatagttctagtggttggctacgtatactccggaatattaatagatcatggagataattaaaatgataaccatctcgcaaataaataagtattttactgttttcgtaacagttttgtaataaaaaaacctataaatattccggattattcataccgtcccaccatcgggcgcggatctcggtccgaaaccatgtcgtactaccatcaccatcaccatcacgattacgatatcccaacgaccgaaaacctgtattttcagggcgccatgggatcc

SEQ ID NO: 214 - DNA, 11434 bp, synthetic construct
  misc_feature 1..11434: note = Description of Artificial Sequence: Synthetic polynucleotide
  source 1..11434: mol_type = other DNA
ggccggcccctgcaggcagctgcgcgctcgctcgctcactgaggccgcccgggcaaagcccgggcgtcgggcgacctttggtcgcccggcctcagtgagcgagcgagcgcgcagagagggagtggccaactccatcactaggggttccttgtagttaatgattaacccgccatgctacttatctacgtagccatgctctagacgggggaggctgctggtgaatattaaccaaggtcaccccagttatcggaggagcaaacaggggctaagtccacacgcgtggtaccgtctgtctgcacatttcgtagagcgagtgttccgatactctaatctccctaggcaaggttcatatttgtgtaggttacttattctccttttgttgactaagtcaataatcagaatcagcaggtttggagtcagcttggcagggatcagcagcctgggttggaaggagggggtataaaagccccttcaccaggagaagccgtcacacagatccacaagctcctgaagaggtaagggtttaagggatggttggttggtggggtattaatgtttaattacctggagcacctgcctgaaatcactttttttcaggttggtttaaacgccgccaccatgcaaattgagttaagtacctgttttttcctgtgcctgttgagattttgcttctctgctaccagaaggtattacctgggagctgtggagctgtcatgggactacatgcagtctgacctgggagagctccctgttgatgctaggtttccccctagggtgccaaagtcctttccttttaacacctcagtggtgtacaagaagacactgtttgtggagtttactgaccacctcttcaatattgctaagccaagacccccttggatgggtctcttgggccctaccatccaggctgaggtttatgatacagtggtgattaccctcaagaatatggcttctcatcctgttagtctgcatgcagtaggggtcagctattggaaggccagtgaaggagctgagtatgatgaccagaccagccagagagagaaagaggatgacaaggtgttccctgggggatcacacacctatgtgtggcaggtgttgaaggaaaatggacccatggcctctgacccactctgcctgacttactcctacctgtctcatgtggacctggtcaaagatctgaactctggcctgattggggcactgttggtgtgcagagaagggtctcttgccaaggagaagactcagaccctgcacaagttcatcctgctgtttgctgtgtttgatgaaggcaagtcttggcattctgagactaagaacagcctgatgcaagatagagatgctgcatctgccagggcctggcctaagatgcacactgtgaatggatatgtgaataggtccttgcctggcctgattggatgccataggaagtctgtgtactggcatgtgattggcatgggcaccacccctgaggttcactctatttttctggagggccatactttccttgtgaggaatcatagacaggcctctctggagattagccctattacatttctgactgctcagaccctcctcatggacttggggcagtttctgttaagctgccacatcagcagccatcaacatgatggtatggaagcctatgtcaaagtggatagctgccctgaagaaccacagcttaggatgaagaacaatgaggaggcagaggactatgatgatgatctgactgattctgaaatggatgtggtgagatttgatgatgataatagcccttcctttatccagatcaggtcagtggccaagaagcacccaaagacctgggtgcattatattgctgctgaggaggaggactgggactatgcccctctggtgctggcccctgatgatagaagctataagtctcaatacttgaataatggcccacagaggattgggagaaagtacaaaaaggtgagatttatggcctacactgatgagactttcaagaccagagaggccatccagcatgaatcaggcattttgggtcccctgctgtatggagaggtgggggataccctgctgatcatctttaagaaccaggccagcagaccttacaacatttaccctcatgggatcacagatgtgaggccactctactctaggagattgcccaagggagtcaagcatcttaaggactttccaatcctgcctggggagatcttcaagtacaaatggacagtgacagttgaggatggacctactaagagtgaccccaggtgtctgaccagatattactctagctttgtcaatatggaaagagacctggcttcaggcttgataggccctcttctcatctgctacaaagagtctgtggaccagagaggaaatcagattatgtctgacaagagaaatgttattctgttttcagtctttgatgagaacagaagttggtacttgacagagaacattcagagatttctgcctaaccctgcaggagtgcagcttgaggaccctgagtttcaggcttccaatatcatgcattctatcaatggctatgtgtttgatagcctgcagctgtctgtgtgcctgcatgaggttgcctattggtacatcctgtctattggggcccaaactgatttcttgtctgtgtttttcagtggatatacctttaagcataagatggtgtatgaagataccttgacacttttccctttctcaggagagactgtcttcatgtctatggagaaccctggactgtggatcctgggatgccacaactcagacttcagaaacaggggtatgacagctctgcttaaggtctcctcatgtgacaaaaatacaggagactactatgaagattcctatgaggacatctctgcttacctgctcagcaaaaacaatgccattgagcccagaagcttcagccagaattccagacatcccagtactaggcagaagcagtttaatgccaccaccatcccagaaaatgacattgagaagacagacccttggtttgcccatagaaccccaatgcccaagattcagaatgtgagcagctcagacttgctgatgctgctgaggcagtctcctactccccatggcctgtccctctcagatctgcaggaagccaagtatgagacattttctgatgacccctccccaggggctattgacagtaacaacagcctgtctgaaatgacccacttcagacctcagctccaccacagtggggatatggtgtttaccccagagtcaggcctgcagctgagactgaatgagaagctgggaaccacagctgccacagaactgaagaagctggatttcaaggtgagctctacttcaaataatctgatttccactatcccatctgacaatttggcagctggcactgacaatacaagctctctgggcccacctagcatgccagtgcattatgacagccagttggacaccactctttttggaaagaaatccagtcccctgacagagtcaggaggacccctttctctgtctgaggagaacaatgatagtaagcttctggagtcaggcttgatgaactcccaggagagttcttggggcaagaatgtgagctctagggagatcaccagaaccactctgcagtctgaccaagaagagattgattatgatgacactatctctgttgagatgaagaaggaggactttgatatctatgatgaggatgagaaccagtctccaagaagtttccagaagaagaccaggcactactttattgctgctgtggagagactgtgggactatggaatgtcctcctcccctcatgtcctgagaaatagagctcagtcaggatcagtgccccagttcaagaaggtggtgttccaggaattcacagatggaagttttacccagccactgtatagaggtgaactgaatgaacatctgggtctgctggggccctatatcagggctgaggtggaggacaatattatggtgacctttagaaaccaggcctcaaggccctacagcttctactcttccctcatttcatatgaggaagaccagagacagggagcagagcctagaaagaactttgtcaagcccaatgaaaccaaaacctatttctggaaggtgcagcaccacatggcacccaccaaagatgagtttgactgcaaagcctgggcctatttctcagatgtggatctggagaaggatgtccattcaggtctgattggaccactcctggtgtgccacaccaacacactgaatccagctcatggcagacaggtgacagtccaggagtttgccctgtttttcactatttttgatgagaccaagagctggtattttacagagaatatggaaagaaactgcagagccccttgtaatatccagatggaggacccaacctttaaggagaactacaggttccatgccatcaatggctacattatggataccctgcctggcctggttatggcccaggatcagaggatcaggtggtatctgctgtcaatgggctccaatgagaacattcatagtattcacttttcaggacatgtgttcacagtgagaaagaaggaggagtataagatggccctctataatctctacccaggggtgtttgagacagttgagatgctgccatctaaggcaggcatctggagagtggaatgcctcattggagagcacctgcatgctggcatgtccaccctgtttctggtgtactccaacaaatgtcagacccctcttggtatggcctctggccacattagggatttccagattactgccagtggtcagtatgggcagtgggcccctaagctggccagactgcactattctgggagcatcaatgcctggtccaccaaggaacctttttcttggattaaagtggatctgctggccccaatgatcatccatgggatcaagacccagggagctaggcagaagttcagcagcctgtacattagtcagttcatcattatgtacagtctggatggcaaaaagtggcagacatacaggggcaattccactggaaccctgatggtgttctttggaaatgtggatagcagtggtatcaagcacaacattttcaaccctcccatcattgccaggtacatcagactgcatccaacccactacagcattaggagcacccttaggatggagctcatggggtgtgacctgaactcttgctctatgccacttggaatggagagcaaggccatctctgatgcccagattactgctagttcctacttcaccaatatgtttgccacctggtcacccagcaaggccaggctgcacctgcagggaaggtccaatgcttggaggcctcaggtgaacaatccaaaggagtggctgcaggtggacttccagaagactatgaaggtgacaggagtgaccactcagggagtgaagagcctgctgacctccatgtatgtgaaggagtttctgatctccagctcccaggatggccaccagtggaccctgttctttcagaatggcaaggtgaaggtgtttcaggggaatcaggactccttcaccccagtggtgaattccctggatccccctctgctgaccagatacctgagaatccacccccagtcttgggtgcaccagattgcccttaggatggaggtgctgggctgtgaggcccaggacctgtactgattaattaagagcatcttaccgccatttattcccatatttgttctgtttttcttgatttgggtatacatttaaatgttaataaaacaaaatggtggggcaatcatttacatttttagggatatgtaattactagttcaggtgtattgccacaagacaaacatgttaagaaactttcccgttatttacgctctgttcctgttaatcaacctctggattacaaaatttgtgaaagattgactgatattcttaactatgttgctccttttacgctgtgtggatatgctgctttatagcctctgtatctagctattgcttcccgtacggctttcgttttctcctccttgtataaatcctggttgctgtctcttttagaggagttgtggcccgttgtccgtcaacgtggcgtggtgtgctctgtgtttgctgacgcaacccccactggctggggcattgccaccacctgtcaactcctttctgggactttcgctttccccctcccgatcgccacggcagaactcatcgccgcctgccttgcccgctgctggacaggggctaggttgctgggcactgataattccgtggtgttgtctgtgccttctagttgccagccatctgttgtttgcccctcccccgtgccttccttgaccctggaaggtgccactcccactgtcctttcctaataaaatgaggaaattgcatcgcattgtctgagtaggtgtcattctattctggggggtggggtggggcaggacagcaagggggaggattgggaagacaatagcaggcatgctggggatgcggtgggctctatggctctagagcatggctacgtagataagtagcatggcgggttaatcattaactacacctgcaggaggaacccctagtgatggagttggccactccctctctgcgcgctcgctcgctcactgaggccgggcgaccaaaggtcgcccgacgcccgggcggcctcagtgagcgagcgagcgcgcagctgcctgcaggggcgcgcctcgaggcatgcggtaccaagcttgtcgagaagtactagaggatcataatcagccataccacatttgtagaggttttacttgctttaaaaaacctcccacacctccccctgaacctgaaacataaaatgaatgcaattgttgttgttaacttgtttattgcagcttataatggttacaaataaagcaatagcatcacaaatttcacaaataaagcatttttttcactgcattctagttgtggtttgtccaaactcatcaatgtatcttatcatgtctggatctgatcactgatatcgcctaggagatccgaaccagataagtgaaatctagttccaaactattttgtcatttttaattttcgtattagcttacgacgctacacccagttcccatctattttgtcactcttccctaaataatccttaaaaactccatttccacccctcccagttcccaactattttgtccgcccacagcggggcatttttcttcctgttatgtttttaatcaaacatcctgccaactccatgtgacaaaccgtcatcttcggctactttttctctgtcacagaatgaaaatttttctgtcatctcttcgttattaatgtttgtaattgactgaatatcaacgcttatttgcagcctgaatggcgaatgggacgcgccctgtagcggcgcattaagcgcggcgggtgtggtggttacgcgcagcgtgaccgctacacttgccagcgccctagcgcccgctcctttcgctttcttcccttcctttctcgccacgttcgccggctttccccgtcaagctctaaatcgggggctccctttagggttccgatttagtgctttacggcacctcgaccccaaaaaacttgattagggtgatggttcacgtagtgggccatcgccctgatagacggtttttcgccctttgacgttggagtccacgttctttaatagtggactcttgttccaaactggaacaacactcaaccctatctcggtctattcttttgatttataagggattttgccgatttcggcctattggttaaaaaatgagctgatttaacaaaaatttaacgcgaattttaacaaaatattaacgtttacaatttcaggtggcacttttcggggaaatgtgcgcggaacccctatttgtttatttttctaaatacattcaaatatgtatccgctcatgagacaataaccctgataaatgcttcaataatattgaaaaaggaagagtatgagtattcaacatttccgtgtcgcccttattcccttttttgcggcattttgccttcctgtttttgctcacccagaaacgctggtgaaagtaaaagatgctgaagatcagttgggtgcacgagtgggttacatcgaactggatctcaacagcggtaagatccttgagagttttcgccccgaagaacgttttccaatgatgagcacttttaaagttctgctatgtggcgcggtattatcccgtattgacgccgggcaagagcaactcggtcgccgcatacactattctcagaatgacttggttgagtactcaccagtcacagaaaagcatcttacggatggcatgacagtaagagaattatgcagtgctgccataaccatgagtgataacactgcggccaacttacttctgacaacgatcggaggaccgaaggagctaaccgcttttttgcacaacatgggggatcatgtaactcgccttgatcgttgggaaccggagctgaatgaagccataccaaacgacgagcgtgacaccacgatgcctgtagcaatggcaacaacgttgcgcaaactattaactggcgaactacttactctagcttcccggcaacaattaatagactggatggaggcggataaagttgcaggaccacttctgcgctcggcccttccggctggctggtttattgctgataaatctggagccggtgagcgtgggtctcgcggtatcattgcagcactggggccagatggtaagccctcccgtatcgtagttatctacacgacggggagtcaggcaactatggatgaacgaaatagacagatcgctgagataggtgcctcactgattaagcattggtaactgtcagaccaagtttactcatatatactttagattgatttaaaacttcatttttaatttaaaaggatctaggtgaagatcctttttgataatctcatgaccaaaatcccttaacgtgagttttcgttccactgagcgtcagaccccgtagaaaagatcaaaggatcttcttgagatcctttttttctgcgcgtaatctgctgcttgcaaacaaaaaaaccaccgctaccagcggtggtttgtttgccggatcaagagctaccaactctttttccgaaggtaactggcttcagcagagcgcagataccaaatactgtccttctagtgtagccgtagttaggccaccacttcaagaactctgtagcaccgcctacatacctcgctctgctaatcctgttaccagtggctgctgccagtggcgataagtcgtgtcttaccgggttggactcaagacgatagttaccggataaggcgcagcggtcgggctgaacggggggttcgtgcacacagcccagcttggagcgaacgacctacaccgaactgagatacctacagcgtgagcattgagaaagcgccacgcttcccgaagggagaaaggcggacaggtatccggtaagcggcagggtcggaacaggagagcgcacgagggagcttccagggggaaacgcctggtatctttatagtcctgtcgggtttcgccacctctgacttgagcgtcgatttttgtgatgctcgtcaggggggcggagcctatggaaaaacgccagcaacgcggcctttttacggttcctggccttttgctggccttttgctcacatgttctttcctgcgttatcccctgattctgtggataaccgtattaccgcctttgagtgagctgataccgctcgccgcagccgaacgaccgagcgcagcgagtcagtgagcgaggaagcggaagagcgcctgatgcggtattttctccttacgcatctgtgcggtatttcacaccgcagaccagccgcgtaacctggcaaaatcggttacggttgagtaataaatggatgccctgcgtaagcgggtgtgggcggacaataaagtcttaaactgaacaaaatagatctaaactatgacaataaagtcttaaactagacagaatagttgtaaactgaaatcagtccagttatgctgtgaaaaagcatactggacttttgttatggctaaagcaaactcttcattttctgaagtgcaaattgcccgtcgtattaaagaggggcgtggccaagggcatggtaaagactatattcgcggcgttgtgacaatttaccgaacaactccgcggccgggaagccgatctcggcttgaacgaattgttaggtggcggtacttgggtcgatatcaaagtgcatcacttcttcccgtatgcccaactttgtatagagagccactgcgggatcgtcaccgtaatctgcttgcacgtagatcacataagcaccaagcgcgttggcctcatgcttgaggagattgatgagcgcggtggcaatgccctgcctccggtgctcgccggagactgcgagatcatagatatagatctcactacgcggctgctcaaacctgggcagaacgtaagccgcgagagcgccaacaaccgcttcttggtcgaaggcagcaagcgcgatgaatgtcttactacggagcaagttcccgaggtaatcggagtccggctgatgttgggagtaggtggctacgtctccgaactcacgaccgaaaagatcaagagcagcccgcatggatttgacttggtcagggccgagcctacatgtgcgaatgatgcccatacttgagccacctaactttgttttagggcgactgccctgctgcgtaacatcgttgctgctgcgtaacatcgttgctgctccataacatcaaacatcgacccacggcgtaacgcgcttgctgcttggatgcccgaggcatagactgtacaaaaaaacagtcataacaagccatgaaaaccgccactgcgccgttaccaccgctgcgttcggtcaaggttctggaccagttgcgtgagcgcatacgctacttgcattacagtttacgaaccgaacaggcttatgtcaactgggttcgtgccttcatccgtttccacggtgtgcgtcacccggcaaccttgggcagcagcgaagtcgaggcatttctgtcctggctggcgaacgagcgcaaggtttcggtctccacgcatcgtcaggcattggcggccttgctgttcttctacggcaaggtgctgtgcacggatctgccctggcttcaggagatcggaagacctcggccgtcgcggcgcttgccggtggtgctgaccccggatgaagtggttcgcatcctcggttttctggaaggcgagcatcgtttgttcgcccaggactctagctatagttctagtggttggctacgtatactccggaatattaatagatcatggagataattaaaatgataaccatctcgcaaataaataagtattttactgttttcgtaacagttttgtaataaaaaaacctataaatattccggattattcataccgtcccaccatcgggcgcggatctcggtccgaaaccatgtcgtactaccatcaccatcaccatcacgattacgatatcccaacgaccgaaaacctgtattttcagggcgccatgggatcc

SEQ ID NO: 215 - DNA, 13477 bp, synthetic construct
  misc_feature 1..13477: note = Description of Artificial Sequence: Synthetic polynucleotide
  source 1..13477: mol_type = other DNA
ggccggcccctgcaggcagctgcgcgctcgctcgctcactgaggccgcccgggcaaagcccgggcgtcgggcgacctttggtcgcccggcctcagtgagcgagcgagcgcgcagagagggagtggccaactccatcactaggggttccttgtagttaatgattaacccgccatgctacttatctacgtagccatgctctagacgggggaggctgctggtgaatattaaccaaggtcaccccagttatcggaggagcaaacaggggctaagtccacacgcgtggtaccgtctgtctgcacatttcgtagagcgagtgttccgatactctaatctccctaggcaaggttcatatttgtgtaggttacttattctccttttgttgactaagtcaataatcagaatcagcaggtttggagtcagcttggcagggatcagcagcctgggttggaaggagggggtataaaagccccttcaccaggagaagccgtcacacagatccacaagctcctgaagaggtaagggtttaagggatggttggttggtggggtattaatgtttaattacctggagcacctgcctgaaatcactttttttcaggttggtttaaacgccgccaccatgcaaatagagctctccacctgcttctttctgtgccttttgcgattctgctttagtgccaccagaagatactacctgggtgcagtggaactgtcatgggactatatgcaaagtgatctcggtgagctgcctgtggacgcaagatttcctcctagagtgccaaaatcttttccattcaacacctcagtcgtgtacaaaaagactctgtttgtagaattcacggatcaccttttcaacatcgctaagccaaggccaccctggatgggtctgctaggtcctaccatccaggctgaggtttatgatacagtggtcattacacttaagaacatggcttcccatcctgtcagtcttcatgctgttggtgtatcctactggaaagcttctgagggagctgaatatgatgatcagaccagtcaaagggagaaagaagatgataaagtcttccctggtggaagccatacatatgtctggcaggtcctgaaagagaatggtccaatggcctctgacccactgtgccttacctactcatatctttctcatgtggacctggtaaaagacttgaattcaggcctcattggagccctactagtatgtagagaagggagtctggccaaggaaaagacacagaccttgcacaaatttatactactttttgctgtatttgatgaagggaaaagttggcactcagaaacaaagaactccttgatgcaggatagggatgctgcatctgctcgggcctggcctaaaatgcacacagtcaatggttatgtaaacaggtctctgccaggtctgattggatgccacaggaaatcagtctattggcatgtgattggaatgggcaccactcctgaagtgcactcaatattcctcgaaggtcacacatttcttgtgaggaaccatcgccaggcgtccttggaaatctcgccaataactttccttactgctcaaacactcttgatggaccttggacagtttctactgttttgtcatatctcttcccaccaacatgatggcatggaagcttatgtcaaagtagacagctgtccagaggaaccccaactacgaatgaaaaataatgaagaagcggaagactatgatgatgatcttactgattctgaaatggatgtggtcaggtttgatgatgacaactctccttcctttatccaaattcgctcagttgccaagaagcatcctaaaacttgggtacattacattgctgctgaagaggaggactgggactatgctcccttagtcctcgcccccgatgacagaagttataaaagtcaatatttgaacaatggccctcagcggattggtaggaagtacaaaaaagtccgatttatggcatacacagatgaaacctttaagactcgtgaagctattcagcatgaatcaggaatcttgggacctttactttatggggaagttggagacacactgttgattatatttaagaatcaagcaagcagaccatataacatctaccctcacggaatcactgatgtccgtcctttgtattcaaggagattaccaaaaggtgtaaaacatttgaaggattttccaattctgccaggagaaatattcaaatataaatggacagtgactgtagaagatgggccaactaaatcagatcctcggtgcctgacccgctattactctagtttcgttaatatggagagagatctagcttcaggactcattggccctctcctcatctgctacaaagaatctgtagatcaaagaggaaaccagataatgtcagacaagaggaatgtcatcctgttttctgtatttgatgagaaccgaagctggtacctcacagagaatatacaacgctttctccccaatccagctggagtgcagcttgaggatccagagttccaagcctccaacatcatgcacagcatcaatggctatgtttttgatagtttgcagttgtcagtttgtttgcatgaggtggcatactggtacattctaagcattggagcacagactgacttcctttctgtcttcttctctggatataccttcaaacacaaaatggtctatgaagacacactcaccctattcccattctcaggagaaactgtcttcatgtcgatggaaaacccaggtctatggattctggggtgccacaactcagactttcggaacagaggcatgaccgccttactgaaggtttctagttgtgacaagaacactggtgattattacgaggacagttatgaagatatttcagcatacttgctgagtaaaaacaatgccattgaaccaagaagcttctcccagaattcaagacaccctagcactaggcaaaagcaatttaatgccaccacaattccagaaaatgacatagagaagactgacccttggtttgcacacagaacacctatgcctaaaatacaaaatgtctcctctagtgatttgttgatgctcttgcgacagagtcctactccacatgggctatccttatctgatctccaagaagccaaatatgagactttttctgatgatccatcacctggagcaatagacagtaataacagcctgtctgaaatgacacacttcaggccacagctccatcacagtggggacatggtatttacccctgagtcaggcctccaattaagattaaatgagaaactggggacaactgcagcaacagagttgaagaaacttgatttcaaagtttctagtacatcaaataatctgatttcaacaattccatcagacaatttggcagcaggtactgataatacaagttccttaggacccccaagtatgccagttcattatgatagtcaattagataccactctatttggcaaaaagtcatctccccttactgagtctggtggacctctgagcttgagtgaagaaaataatgattcaaagttgttagaatcaggtttaatgaatagccaagaaagttcatggggaaaaaatgtatcgtcaacagagagtggtaggttatttaaagggaaaagagctcatggacctgctttgttgactaaagataatgccttattcaaagttagcatctctttgttaaagacaaacaaaacttccaataattcagcaactaatagaaagactcacattgatggcccatcattattaattgagaatagtccatcagtctggcaaaatatattagaaagtgacactgagtttaaaaaagtgacacctttgattcatgacagaatgcttatggacaaaaatgctacagctttgaggctaaatcatatgtcaaataaaactacttcatcaaaaaacatggaaatggtccaacagaaaaaagagggccccattccaccagatgcacaaaatccagatatgtcgttctttaagatgctattcttgccagaatcagcaaggtggatacaaaggactcatggaaagaactctctgaactctgggcaaggccccagtccaaagcaattagtatccttaggaccagaaaaatctgtggaaggtcagaatttcttgtctgagaaaaacaaagtggtagtaggaaagggtgaatttacaaaggacgtaggactcaaagagatggtttttccaagcagcagaaacctatttcttactaacttggataatttacatgaaaataatacacacaatcaagaaaaaaaaattcaggaagaaatagaaaagaaggaaacattaatccaagagaatgtagttttgcctcagatacatacagtgactggcactaagaatttcatgaagaaccttttcttactgagcactaggcaaaatgtagaaggttcatatgacggggcatatgctccagtacttcaagattttaggtcattaaatgattcaacaaatagaacaaagaaacacacagctcatttctcaaaaaaaggggaggaagaaaacttggaaggcttgggaaatcaaaccaagcaaattgtagagaaatatgcatgcaccacaaggatatctcctaatacaagccagcagaattttgtcacgcaacgtagtaagagagctttgaaacaattcagactcccactagaagaaacagaacttgaaaaaaggataattgtggatgacacctcaacccagtggtccaaaaacatgaaacatttgaccccgagcaccctcacacagatagactacaatgagaaggagaaaggggccattactcagtctcccttatcagattgccttacgaggagtcatagcatccctcaagcaaatagatctccattacccattgcaaaggtatcatcatttccatctattagacctatatatctgaccagggtcctattccaagacaactcttctcatcttccagcagcatcttatagaaagaaagattctggggtccaagaaagcagtcatttcttacaaggagccaaaaaaaataacctttctttagccattctaaccttggagatgactggtgatcaaagagaggttggctccctggggacaagtgccacaaattcagtcacatacaagaaagttgagaacactgttctcccgaaaccagacttgcccaaaacatctggcaaagttgaattgcttccaaaagttcacatttatcagaaggacctattccctacggaaactagcaatgggtctcctggccatctggatctcgtggaagggagccttcttcagggaacagagggagcgattaagtggaatgaagcaaacagacctggaaaagttccctttctgagagtagcaacagaaagctctgcaaagactccctccaagctattggatcctcttgcttgggataaccactatggtactcagataccaaaagaagagtggaaatcccaagagaagtcaccagaaaaaacagcttttaagaaaaaggataccattttgtccctgaacgcttgtgaaagcaatcatgcaatagcagcaataaatgagggacaaaataagcccgaaatagaagtcacctgggcaaagcaaggtaggactgaaaggctgtgctctcaaaacccaccagtcttgaaacgccatcaacgggaaataactcgtactactcttcagtcagatcaagaggaaattgactatgatgataccatatcagttgaaatgaagaaggaagattttgacatttatgatgaggatgaaaatcagagcccccgcagctttcaaaagaaaacacgacactattttattgctgcagtggagaggctctgggattatgggatgagtagctccccacatgttctaagaaacagggctcagagtggcagtgtccctcagttcaagaaagttgttttccaggaatttactgatggctcctttactcagcccttataccgtggagaactaaatgaacatttgggactcctggggccatatataagagcagaagttgaagataatatcatggtaactttcagaaatcaggcctctcgtccctattccttctattctagccttatttcttatgaggaagatcagaggcaaggagcagaacctagaaaaaactttgtcaagcctaatgaaaccaaaacttacttttggaaagtgcaacatcatatggcacccactaaagatgagtttgactgcaaagcctgggcttatttctctgatgttgacctggaaaaagatgtgcactcaggcctgattggaccccttctggtctgccacactaacacactgaaccctgctcatgggagacaagtgacagtacaggaatttgctctgtttttcaccatctttgatgagaccaaaagctggtacttcactgaaaatatggaaagaaactgcagggctccctgcaatatccagatggaagatcccacttttaaagagaattatcgcttccatgcaatcaatggctacataatggatacactacctggcttagtaatggctcaggatcaaaggattcgatggtatctgctcagcatgggcagcaatgaaaacatccattctattcatttcagtggacatgtgttcactgtacgaaaaaaagaggagtataaaatggcactgtacaatctctatccaggtgtttttgagacagtggaaatgttaccatccaaagctggaatttggcgggtggaatgccttattggcgagcatctacatgctgggatgagcacactttttctggtgtacagcaataagtgtcagactcccctgggaatggcttctggacacattagagattttcagattacagcttcaggacaatatggacagtgggccccaaagctggccagacttcattattccggatcaatcaatgcctggagcaccaaggagcccttttcttggatcaaggtggatctgttggcaccaatgattattcacggcatcaagacccagggtgcccgtcagaagttctccagcctctacatctctcagtttatcatcatgtatagtcttgatgggaagaagtggcagacttatcgaggaaattccactggaaccttaatggtcttctttggcaatgtggattcatctgggataaaacacaatatttttaaccctccaattattgctcgatacatccgtttgcacccaactcattatagcattcgcagcactcttcgcatggagttgatgggctgtgatttaaatagttgcagcatgccattgggaatggagagtaaagcaatatcagatgcacagattactgcttcatcctactttaccaatatgtttgccacctggtctccttcaaaagctcgacttcacctccaagggaggagtaatgcctggagacctcaggtgaataatccaaaagagtggctgcaagtggacttccagaagacaatgaaagtcacaggagtaactactcagggagtaaaatctctgcttaccagcatgtatgtgaaggagttcctcatctccagcagtcaagatggccatcagtggactctcttttttcagaatggcaaagtaaaggtttttcagggaaatcaagactccttcacacctgtggtgaactctctagacccaccgttactgactcgctaccttcgaattcacccccagagttgggtgcaccagattgccctgaggatggaggttctgggctgcgaggcacaggacctctactgattaattaagagcatcttaccgccatttattcccatatttgttctgtttttcttgatttgggtatacatttaaatgttaataaaacaaaatggtggggcaatcatttacatttttagggatatgtaattactagttcaggtgtattgccacaagacaaacatgttaagaaactttcccgttatttacgctctgttcctgttaatcaacctctggattacaaaatttgtgaaagattgactgatattcttaactatgttgctccttttacgctgtgtggatatgctgctttatagcctctgtatctagctattgcttcccgtacggctttcgttttctcctccttgtataaatcctggttgctgtctcttttagaggagttgtggcccgttgtccgtcaacgtggcgtggtgtgctctgtgtttgctgacgcaacccccactggctggggcattgccaccacctgtcaactcctttctgggactttcgctttccccctcccgatcgccacggcagaactcatcgccgcctgccttgcccgctgctggacaggggctaggttgctgggcactgataattccgtggtgttgtctgtgccttctagttgccagccatctgttgtttgcccctcccccgtgccttccttgaccctggaaggtgccactcccactgtcctttcctaataaaatgaggaaattgcatcgcattgtctgagtaggtgtcattctattctggggggtggggtggggcaggacagcaagggggaggattgggaagacaatagcaggcatgctggggatgcggtgggctctatggctctagagcatggctacgtagataagtagcatggcgggttaatcattaactacacctgcaggaggaacccctagtgatggagttggccactccctctctgcgcgctcgctcgctcactgaggccgggcgaccaaaggtcgcccgacgcccgggcggcctcagtgagcgagcgagcgcgcagctgcctgcaggggcgcgcctcgaggcatgcggtaccaagcttgtcgagaagtactagaggatcataatcagccataccacatttgtagaggttttacttgctttaaaaaacctcccacacctccccctgaacctgaaacataaaatgaatgcaattgttgttgttaacttgtttattgcagcttataatggttacaaataaagcaatagcatcacaaatttcacaaataaagcatttttttcactgcattctagttgtggtttgtccaaactcatcaatgtatcttatcatgtctggatctgatcactgatatcgcctaggagatccgaaccagataagtgaaatctagttccaaactattttgtcatttttaattttcgtattagcttacgacgctacacccagttcccatctattttgtcactcttccctaaataatccttaaaaactccatttccacccctcccagttcccaactattttgtccgcccacagcggggcatttttcttcctgttatgtttttaatcaaacatcctgccaactccatgtgacaaaccgtcatcttcggctactttttctctgtcacagaatgaaaatttttctgtcatctcttcgttattaatgtttgtaattgactgaatatcaacgcttatttgcagcctgaatggcgaatgggacgcgccctgtagcggcgcattaagcgcggcgggtgtggtggttacgcgcagcgtgaccgctacacttgccagcgccctagcgcccgctcctttcgctttcttcccttcctttctcgccacgttcgccggctttccccgtcaagctctaaatcgggggctccctttagggttccgatttagtgctttacggcacctcgaccccaaaaaacttgattagggtgatggttcacgtagtgggccatcgccctgatagacggtttttcgccctttgacgttggagtccacgttctttaatagtggactcttgttccaaactggaacaacactcaaccctatctcggtctattcttttgatttataagggattttgccgatttcggcctattggttaaaaaatgagctgatttaacaaaaatttaacgcgaattttaacaaaatattaacgtttacaatttcaggtggcacttttcggggaaatgtgcgcggaacccctatttgtttatttttctaaatacattcaaatatgtatccgctcatgagacaataaccctgataaatgcttcaataatattgaaaaaggaagagtatgagtattcaacatttccgtgtcgcccttattcccttttttgcggcattttgccttcctgtttttgctcacccagaaacgctggtgaaagtaaaagatgctgaagatcagttgggtgcacgagtgggttacatcgaactggatctcaacagcggtaagatccttgagagttttcgccccgaagaacgttttccaatgatgagcacttttaaagttctgctatgtggcgcggtattatcccgtattgacgccgggcaagagcaactcggtcgccgcatacactattctcagaatgacttggttgagtactcaccagtcacagaaaagcatcttacggatggcatgacagtaagagaattatgcagtgctgccataaccatgagtgataacactgcggccaacttacttctgacaacgatcggaggaccgaaggagctaaccgcttttttgcacaacatgggggatcatgtaactcgccttgatcgttgggaaccggagctgaatgaagccataccaaacgacgagcgtgacaccacgatgcctgtagcaatggcaacaacgttgcgcaaactattaactggcgaactacttactctagcttcccggcaacaattaatagactggatggaggcggataaagttgcaggaccacttctgcgctcggcccttccggctggctggtttattgctgataaatctggagccggtgagcgtgggtctcgcggtatcattgcagcactggggccagatggtaagccctcccgtatcgtagttatctacacgacggggagtcaggcaactatggatgaacgaaatagacagatcgctgagataggtgcctcactgattaagcattggtaactgtcagaccaagtttactcatatatactttagattgatttaaaacttcatttttaatttaaaaggatctaggtgaagatcctttttgataatctcatgaccaaaatcccttaacgtgagttttcgttccactgagcgtcagaccccgtagaaaagatcaaaggatcttcttgagatcctttttttctgcgcgtaatctgctgcttgcaaacaaaaaaaccaccgctaccagcggtggtttgtttgccggatcaagagctaccaactctttttccgaaggtaactggcttcagcagagcgcagataccaaatactgtccttctagtgtagccgtagttaggccaccacttcaagaactctgtagcaccgcctacatacctcgctctgctaatcctgttaccagtggctgctgccagtggcgataagtcgtgtcttaccgggttggactcaagacgatagttaccggataaggcgcagcggtcgggctgaacggggggttcgtgcacacagcccagcttggagcgaacgacctacaccgaactgagatacctacagcgtgagcattgagaaagcgccacgcttcccgaagggagaaaggcggacaggtatccggtaagcggcagggtcggaacaggagagcgcacgagggagcttccagggggaaacgcctggtatctttatagtcctgtcgggtttcgccacctctgacttgagcgtcgatttttgtgatgctcgtcaggggggcggagcctatggaaaaacgccagcaacgcggcctttttacggttcctggccttttgctggccttttgctcacatgttctttcctgcgttatcccctgattctgtggataaccgtattaccgcctttgagtgagctgataccgctcgccgcagccgaacgaccgagcgcagcgagtcagtgagcgaggaagcggaagagcgcctgatgcggtattttctccttacgcatctgtgcggtatttcacaccgcagaccagccgcgtaacctggcaaaatcggttacggttgagtaataaatggatgccctgcgtaagcgggtgtgggcggacaataaagtcttaaactgaacaaaatagatctaaactatgacaataaagtcttaaactagacagaatagttgtaaactgaaatcagtccagttatgctgtgaaaaagcatactggacttttgttatggctaaagcaaactcttcattttctgaagtgcaaattgcccgtcgtattaaagaggggcgtggccaagggcatggtaaagactatattcgcggcgttgtgacaatttaccgaacaactccgcggccgggaagccgatctcggcttgaacgaattgttaggtggcggtacttgggtcgatatcaaagtgcatcacttcttcccgtatgcccaactttgtatagagagccactgcgggatcgtcaccgtaatctgcttgcacgtagatcacataagcaccaagcgcgttggcctcatgcttgaggagattgatgagcgcggtggcaatgccctgcctccggtgctcgccggagactgcgagatcatagatatagatctcactacgcggctgctcaaacctgggcagaacgtaagccgcgagagcgccaacaaccgcttcttggtcgaaggcagcaagcgcgatgaatgtcttactacggagcaagttcccgaggtaatcggagtccggctgatgttgggagtaggtggctacgtctccgaactcacgaccgaaaagatcaagagcagcccgcatggatttgacttggtcagggccgagcctacatgtgcgaatgatgcccatacttgagccacctaactttgttttagggcgactgccctgctgcgtaacatcgttgctgctgcgtaacatcgttgctgctccataacatcaaacatcgacccacggcgtaacgcgcttgctgcttggatgcccgaggcatagactgtacaaaaaaacagtcataacaagccatgaaaaccgccactgcgccgttaccaccgctgcgttcggtcaaggttctggaccagttgcgtgagcgcatacgctacttgcattacagtttacgaaccgaacaggcttatgtcaactgggttcgtgccttcatccgtttccacggtgtgcgtcacccggcaaccttgggcagcagcgaagtcgaggcatttctgtcctggctggcgaacgagcgcaaggtttcggtctccacgcatcgtcaggcattggcggccttgctgttcttctacggcaaggtgctgtgcacggatctgccctggcttcaggagatcggaagacctcggccgtcgcggcgcttgccggtggtgctgaccccggatgaagtggttcgcatcctcggttttctggaaggcgagcatcgtttgttcgcccaggactctagctatagttctagtggttggctacgtatactccggaatattaatagatcatggagataattaaaatgataaccatctcgcaaataaataagtattttactgttttcgtaacagttttgtaataaaaaaacctataaatattccggattattcataccgtcccaccatcgggcgcggatctcggtccgaaaccatgtcgtactaccatcaccatcaccatcacgattacgatatcccaacgaccgaaaacctgtattttcagggcgccatgggatcc

SEQ ID NO: 216 - DNA, 11180 bp, synthetic construct
  misc_feature 1..11180: note = Description of Artificial Sequence: Synthetic polynucleotide
  source 1..11180: mol_type = other DNA
aaagtagccgaagatgacggtttgtcacatggagttggcaggatgtttgattaaaaacataacaggaagaaaaatgccccgctgtgggcggacaaaatagttgggaactgggaggggtggaaatggagtttttaaggattatttagggaagagtgacaaaatagatgggaactgggtgtagcgtcgtaagctaatacgaaaattaaaaatgacaaaatagtttggaactagatttcacttatctggttcggatctcctaggctcaagcagtgatcagatccagacatgataagatacattgatgagtttggacaaaccacaactagaatgcagtgaaaaaaatgctttatttgtgaaatttgtgatgctattgctttatttgtaaccattataagctgcaataaacaagttaacaacaacaattgcattcattttatgtttcaggttcagggggaggtgtgggaggttttttaaagcaagtaaaacctctacaaatgtggtatggctgattatgatcctctagtacttctcgacaagcttgtcgagactgcaggctctagaggccggcccctgcaggcagctgcgcgctcgctcgctcactgaggccgcccgggcaaagcccgggcgtcgggcgacctttggtcgcccggcctcagtgagcgagcgagcgcgcagagagggagtggccaactccatcactaggggttccttgtagttaatgattaacccgccatgctacttatctacgtagccatgcatatggagtcaatgggaaaaacccattggagccaagtacactgactcaatagggactttccattgggttttgcccagtacataaggtcaatagggggtgagtcaacaggaaagtcccattggagccaagtacattgagtcaatagggactttccaatgggttttgcccagtacataaggtcaatgggaggtaagccaatgggtttttcccattactgacatgtatactgagtcattagggactttccaatgggttttgcccagtacataaggtcaataggggtgaatcaacaggaaagtcccattggagccaagtacactgagtcaatagggactttccattgggttttgcccagtacaaaaggtcaatagggggtgagtcaatgggtttttcccattattggcacatacataaggtcaataggggtgactagtggagaagagcatgcttgagggctgagtgcccctcagtgggcagagagcacatggcccacagtccctgagaagttggggggaggggtgggcaattgaactggtgcctagagaaggtggggcttgggtaaactgggaaagtgatgtggtgtactggctccacctttttccccagggtgggggagaaccatatataagtgcagtagtctctgtgaacattcaagcttctgccttctccctcctgtgagtttggtaagtcactgactgtctatgcctgggaaagggtgggcaggagatggggcagtgcaggaaaagtggcactatgaaccctgcagccctagacaattgtactaaccttcttctctttcctctcctgacaggttggtgtacagtagcttccgtttaaacagccaccatgcagatagaattatctacttgtttttttctttgtctgctcaggttctgcttctctgctacaaggaggtattacttaggtgctgtagagttatcttgggactacatgcagtctgatcttggggagctccctgtggatgcaagatttccccctagagtacctaaaagtttccctttcaacacaagtgtggtgtataagaagactctgtttgttgagttcacagatcaccttttcaatattgccaagcccagacccccctggatgggtctactggggccaacaattcaagcagaggtatatgatacagtggtgatcacattaaagaacatggcatcccaccctgtaagcctgcatgctgttggtgtgtcctattggaaagcaagtgaaggtgctgaatatgatgatcaaacatcccaaagagagaaggaagatgacaaagtcttcccaggtggctctcacacctatgtgtggcaagtgctcaaggaaaatgggcctatggctagtgatccattgtgcctcacatatagctacctgtcccatgtggacttagttaaagatctgaactcaggtctgattggtgccctgctggtctgtagggaaggatcactagctaaagaaaaaacccagactttacacaagttcatcttattatttgctgtttttgatgagggaaagagctggcactcagagactaagaattcactcatgcaggatagagatgcagcttctgctagagcatggccaaaaatgcatactgtgaatgggtatgttaacaggagtctgcctggcctcataggctgccatagaaaatcagtgtactggcatgtcataggtatgggcactactcctgaggtgcattccatttttttggaggggcatactttccttgtaagaaaccacaggcaggcttcattggaaattagtccaataacctttctcacagcccagactctgctaatggacttggggcagtttttattattttgtcacattagctctcatcagcatgatggaatggaagcctatgttaaggttgattcctgcccagaagagccccagttgagaatgaagaacaatgaggaagcagaagactatgatgatgatctaacagactcagaaatggatgttgtgagatttgatgatgataactccccaagttttattcagatcaggtcagtggccaagaaacatccaaaaacatgggttcattatattgcagcagaagaagaagactgggattatgcacccttggtattagcccctgatgacagaagctataagtcacaatatctcaacaatggaccccagagaattggcagaaagtacaaaaaagtcaggtttatggcttatactgatgagactttcaaaactagagaggctattcaacatgaatctggcatcctaggtcctttgttatatggggaagtaggggacaccttattaattatatttaaaaaccaggccagtaggccttacaacatttacccccacggtataacagatgtcagaccactgtactcaaggaggctaccaaaaggggtgaagcacctaaaagacttccccatcctacctggtgagattttcaagtataagtggacagtgactgtagaagatggtccaaccaaatcagatcccagatgcctgacaaggtactacagtagctttgtaaatatggagagagacctggcctcagggttaatagggcccctactgatctgctacaaggagagtgtagaccaaagaggcaaccaaattatgtcagacaagagaaatgtcatcctctttagtgtttttgatgagaataggtcctggtacctgacagaaaatatccaaagattccttccaaatccagcaggggtacaactggaggaccctgagttccaggcctccaatatcatgcacagcatcaatggttatgtgtttgacagtttgcaactttcagtgtgccttcatgaggttgcatactggtatatactttctataggggcccagacagacttcttgtcagttttcttttcaggctatactttcaagcataagatggtatatgaagataccctgactctttttccctttagtggtgagacagttttcatgtcaatggaaaacccagggctttggatcttgggatgccacaactctgactttagaaacagaggcatgactgcccttttaaaggtgtcctcttgtgataagaatactggagactactatgaggacagctatgaggacatttcagcctatctgctgtcaaaaaataatgctatagagccaaggtcattttctcaaaatcctcctgtcctgaagaggcaccaaagagagataaccaggactaccttacagtctgaccaggaggaaattgattatgatgacacaataagtgtggagatgaaaaaggaggattttgatatttatgatgaggatgaaaaccaatctccaagatctttccagaagaagactagacactatttcattgctgcagtggaaagactgtgggactatggaatgtcctccagccctcatgttctcaggaatagggctcaaagtggttctgtgccacagttcaagaaggtggtgtttcaggaattcacagatgggtcctttactcaaccactgtataggggagaactcaatgaacatctaggattactaggtccctacattagagctgaggtggaggacaatatcatggtcactttcaggaaccaggcatctagaccatactctttttacagctccttgatatcttatgaagaggaccagagacagggtgcagaacccaggaagaactttgtgaaacccaatgagaccaaaacatacttctggaaggtccagcatcatatggctcctaccaaggatgaatttgactgcaaagcctgggcttacttctcagatgtggatttggagaaagatgtgcacagtggcttgattgggcctcttttggtatgtcataccaacaccttaaaccctgctcatggaagacaagtaacagtgcaagagtttgccctctttttcactatatttgatgagacaaaaagttggtactttactgagaatatggagaggaactgcagggctccctgcaatatacagatggaggatcctactttcaaggaaaactataggtttcatgccattaatggctatatcatggatacattgcctggcttagttatggcccaggatcagagaatcagatggtacctccttagtatgggaagcaatgaaaacatacattctattcacttcagtggacatgtctttactgtgagaaaaaaggaagagtacaagatggcactgtacaatctgtaccctggagtgtttgagacagttgagatgctgcccagcaaggctgggatctggagggtagaatgcctgattggagaacacttacatgcaggtatgtccactctattcttggtctattccaacaagtgtcagacccccctaggcatggcatctggccatattagagatttccagataactgcttctggtcagtatggccagtgggcccccaagcttgctagacttcactacagtggttcaataaatgcctggtccaccaaggagcccttcagctggattaaagtggacttgctagcccccatgatcattcatgggataaaaacacagggtgccagacagaaattttcatctctgtacatcagccagtttatcatcatgtacagtctggatggcaaaaaatggcagacctacagaggtaactctacaggtacactaatggtattttttggcaatgtagattcatcaggtatcaagcataatatctttaatcctcccattattgccagatacatcaggttgcacccaactcattacagtataagatccactttaaggatggagcttatggggtgtgaccttaatagctgcagtatgcccttgggaatggaaagtaaggccatatcagatgcccagattactgcaagcagctactttacaaacatgtttgcaacctggtctcctagtaaagccaggctgcacttgcagggtaggagcaatgcatggagaccccaggtcaataacccaaaagagtggcttcaagttgactttcaaaagacaatgaaggtaacaggggtaaccacccaaggggtaaagagtctgctgacatctatgtatgtaaaagaattcctcatctcaagtagtcaagatgggcaccagtggacactgttcttccagaatggaaaagttaaggtgttccaaggtaatcaagacagcttcactccagtggtgaacagtctggatccaccactcctaaccaggtacctgaggatccaccctcagtcctgggtccaccagatagctctgagaatggaagtgctgggctgtgaagctcaggacctatactgattaattaataaaatacagcatagcaaaactttaacctccaaatcaagcctctacttgaatccttttctgagggatgaataaggcataggcatcaggggctgttgccaatgtgcattagctgtttgcagcctcaccttctttcatggagtttaagatatagtgtattttcccaaggtttgaactagctcttcatttctttatgttttaaatgcactgacctcccacattccctttttagtaaaatattcagaaataatttaaatacatcattgcaatgaaaataaatgttttttattaggcagaatccagatgctcaaggcccttcataatatcccccagtttagtagttggacttagggaacaaaggaacctttaatagaaattggacagcaagaaagcgagctccataaagtaggaaacactacacgattccataaagtaggaaacactacatcactccataaagtaggaaacactacacagacatgataagatacattgatgagtttggacaaaccacaactagaatgcagtgaaaaaaatgctttatttgtgaaatttgtgatgctattgctttatttgtaaccattataagctgcaataaacaagttaacaacaacaattgcattcattttatgtttcaggttcagggggagatgtgggaggttttttaaagcaagtaaaacctctacaaatgtggtacttaagcatggctacgtagataagtagcatggcgggttaatcattaactacacctgcaggaggaacccctagtgatggagttggccactccctctctgcgcgctcgctcgctcactgaggccgggcgaccaaaggtcgcccgacgcccgggcggcctcagtgagcgagcgagcgcgcagctgcctgcaggggcgcgccgctagcagctgatgcatagcatgcggtaccgggagatgggggaggctaactgaaacacggaaggagacaataccggaaggaacccgcgctatgacggcaataaaaagacagaataaaacgcacgggtgttgggtcgtttgttcataaacgcggggttcggtcccagggctggcactctgtcgataccccaccgagaccccattgggaccaatacgcccgcgtttcttccttttccccaccccaacccccaagttcgggtgaaggcccagggctcgcagccaacgtcggggcggcaagccctgccatagccactacgggtacgtaggccaaccactagaactatagctagagtcctgggcgaacaaacgatgctcgccttccagaaaaccgaggatgcgaaccacttcatccggggtcagcaccaccggcaagcgccgcgacggccgaggtctaccgatctcctgaagccagggcagatccgtgcacagcaccttgccgtagaagaacagcaaggccgccaatgcctgacgatgcgtggagaccgaaaccttgcgctcgttcgccagccaggacagaaatgcctcgacttcgctgctgcccaaggttgccgggtgacgcacaccgtggaaacggatgaaggcacgaacccagttgacataagcctgttcggttcgtaaactgtaatgcaagtagcgtatgcgctcacgcaactggtccagaaccttgaccgaacgcagcggtggtaacggcgcagtggcggttttcatggcttgttatgactgtttttttgtacagtctatgcctcgggcatccaagcagcaagcgcgttacgccgtgggtcgatgtttgatgttatggagcagcaacgatgttacgcagcagcaacgatgttacgcagcagggcagtcgccctaaaacaaagttaggtggctcaagtatgggcatcattcgcacatgtaggctcggccctgaccaagtcaaatccatgcgggctgctcttgatcttttcggtcgtgagttcggagacgtagccacctactcccaacatcagccggactccgattacctcgggaacttgctccgtagtaagacattcatcgcgcttgctgccttcgaccaagaagcggttgttggcgctctcgcggcttacgttctgcccaggtttgagcagccgcgtagtgagatctatatctatgatctcgcagtctccggcgagcaccggaggcagggcattgccaccgcgctcatcaatctcctcaagcatgaggccaacgcgcttggtgcttatgtgatctacgtgcaagcagattacggtgacgatcccgcagtggctctctatacaaagttgggcatacgggaagaagtgatgcactttgatatcgacccaagtaccgccacctaacaattcgttcaagccgagatcggcttcccggccgcggagttgttcggtaaattgtcacaacgccgcgaatatagtctttaccatgcccttggccacgcccctctttaatacgacgggcaatttgcacttcagaaaatgaagagtttgctttagccataacaaaagtccagtatgctttttcacagcataactggactgatttcagtttacaactattctgtctagtttaagactttattgtcatagtttagatctattttgttcagtttaagactttattgtccgcccacacccgcttacgcagggcatccatttattactcaaccgtaaccgattttgccaggttacgcggctggtctgcggtgtgaaataccgcacagatgcgtaaggagaaaataccgcatcaggcgctcttccgcttcctcgctcactgactcgctgcgctcggtcgttcggctgcggcgagcggtatcagctcactcaaaggcggtaatacggttatccacagaatcaggggataacgcaggaaagaacatgtgagcaaaaggccagcaaaaggccaggaaccgtaaaaaggccgcgttgctggcgtttttccataggctccgcccccctgacgagcatcacaaaaatcgacgctcaagtcagaggtggcgaaacccgacaggactataaagataccaggcgtttccccctggaagctccctcgtgcgctctcctgttccgaccctgccgcttaccggatacctgtccgcctttctcccttcgggaagcgtggcgctttctcaatgctcacgctgtaggtatctcagttcggtgtaggtcgttcgctccaagctgggctgtgtgcacgaaccccccgttcagcccgaccgctgcgccttatccggtaactatcgtcttgagtccaacccggtaagacacgacttatcgccactggcagcagccactggtaacaggattagcagagcgaggtatgtaggcggtgctacagagttcttgaagtggtggcctaactacggctacactagaaggacagtatttggtatctgcgctctgctgaagccagttaccttcggaaaaagagttggtagctcttgatccggcaaacaaaccaccgctggtagcggtggtttttttgtttgcaagcagcagattacgcgcagaaaaaaaggatctcaagaagatcctttgatcttttctacggggtctgacgctcagtggaacgaaaactcacgttaagggattttggtcatgagattatcaaaaaggatcttcacctagatccttttaaattaaaaatgaagttttaaatcaatctaaagtatatatgagtaaacttggtctgacagttaccaatgcttaatcagtgaggcacctatctcagcgatctgtctatttcgttcatccatagttgcctgactccccgtcgtgtagataactacgatacgggagggcttaccatctggccccagtgctgcaatgataccgcgagacccacgctcaccggctccagatttatcagcaataaaccagccagccggaagggccgagcgcagaagtggtcctgcaactttatccgcctccatccagtctattaattgttgccgggaagctagagtaagtagttcgccagttaatagtttgcgcaacgttgttgccattgctacaggcatcgtggtgtcacgctcgtcgtttggtatggcttcattcagctccggttcccaacgatcaaggcgagttacatgatcccccatgttgtgcaaaaaagcggttagctccttcggtcctccgatcgttgtcagaagtaagttggccgcagtgttatcactcatggttatggcagcactgcataattctcttactgtcatgccatccgtaagatgcttttctgtgactggtgagtactcaaccaagtcattctgagaatagtgtatgcggcgaccgagttgctcttgcccggcgtcaatacgggataataccgcgccacatagcagaactttaaaagtgctcatcattggaaaacgttcttcggggcgaaaactctcaaggatcttaccgctgttgagatccagttcgatgtaacccactcgtgcacccaactgatcttcagcatcttttactttcaccagcgtttctgggtgagcaaaaacaggaaggcaaaatgccgcaaaaaagggaataagggcgacacggaaatgttgaatactcatactcttcctttttcaatattattgaagcatttatcagggttattgtctcatgagcggatacatatttgaatgtatttagaaaaataaacaaataggggttccgcgcacatttccccgaaaagtgccacctgaaattgtaaacgttaatattttgttaaaattcgcgttaaatttttgttaaatcagctcattttttaaccaataggccgaaatcggcaaaatcccttataaatcaaaagaatagaccgagatagggttgagtgttgttccagtttggaacaagagtccactattaaagaacgtggactccaacgtcaaagggcgaaaaaccgtctatcagggcgatggcccactacgtgaaccatcaccctaatcaagttttttggggtcgaggtgccgtaaagcactaaatcggaaccctaaagggagcccccgatttagagcttgacggggaaagccggcgaacgtggcgagaaaggaagggaagaaagcgaaaggagcgggcgctagggcgctggcaagtgtagcggtcacgctgcgcgtaaccaccacacccgccgcgcttaatgcgccgctacagggcgcgtcccattcgccattcaggctgcaaataagcgttgatattcagtcaattacaaacattaataacgaagagatgacagaaaaattttcattctgtgacagagaa

SEQ ID NO: 217 - DNA, 13862 bp, synthetic construct
  misc_feature 1..13862: note = Description of Artificial Sequence: Synthetic polynucleotide
  source 1..13862: mol_type = other DNA
aaagtagccgaagatgacggtttgtcacatggagttggcaggatgtttgattaaaaacataacaggaagaaaaatgccccgctgtgggcggacaaaatagttgggaactgggaggggtggaaatggagtttttaaggattatttagggaagagtgacaaaatagatgggaactgggtgtagcgtcgtaagctaatacgaaaattaaaaatgacaaaatagtttggaactagatttcacttatctggttcggatctcctaggctcaagcagtgatcagatccagacatgataagatacattgatgagtttggacaaaccacaactagaatgcagtgaaaaaaatgctttatttgtgaaatttgtgatgctattgctttatttgtaaccattataagctgcaataaacaagttaacaacaacaattgcattcattttatgtttcaggttcagggggaggtgtgggaggttttttaaagcaagtaaaacctctacaaatgtggtatggctgattatgatcctctagtacttctcgacaagcttgtcgagactgcaggctctagaggccggcccctgcaggcagctgcgcgctcgctcgctcactgaggccgcccgggcaaagcccgggcgtcgggcgacctttggtcgcccggcctcagtgagcgagcgagcgcgcagagagggagtggccaactccatcactaggggttccttgtagttaatgattaacccgccatgctacttatctacgtagccatgcatatggagtcaatgggaaaaacccattggagccaagtacactgactcaatagggactttccattgggttttgcccagtacataaggtcaatagggggtgagtcaacaggaaagtcccattggagccaagtacattgagtcaatagggactttccaatgggttttgcccagtacataaggtcaatgggaggtaagccaatgggtttttcccattactgacatgtatactgagtcattagggactttccaatgggttttgcccagtacataaggtcaataggggtgaatcaacaggaaagtcccattggagccaagtacactgagtcaatagggactttccattgggttttgcccagtacaaaaggtcaatagggggtgagtcaatgggtttttcccattattggcacatacataaggtcaataggggtgactagtggagaagagcatgcttgagggctgagtgcccctcagtgggcagagagcacatggcccacagtccctgagaagttggggggaggggtgggcaattgaactggtgcctagagaaggtggggcttgggtaaactgggaaagtgatgtggtgtactggctccacctttttccccagggtgggggagaaccatatataagtgcagtagtctctgtgaacattcaagcttctgccttctccctcctgtgagtttggtaagtcactgactgtctatgcctgggaaagggtgggcaggagatggggcagtgcaggaaaagtggcactatgaaccctgcagccctagacaattgtactaaccttcttctctttcctctcctgacaggttggtgtacagtagcttccgtttaaacagccaccatgcaaatagagctctccacctgcttctttctgtgccttttgcgattctgctttagtgccaccagaagatactacctgggtgcagtggaactgtcatgggactatatgcaaagtgatctcggtgagctgcctgtggacgcaagatttcctcctagagtgccaaaatcttttccattcaacacctcagtcgtgtacaaaaagactctgtttgtagaattcacggatcaccttttcaacatcgctaagccaaggccaccctggatgggtctgctaggtcctaccatccaggctgaggtttatgatacagtggtcattacacttaagaacatggcttcccatcctgtcagtcttcatgctgttggtgtatcctactggaaagcttctgagggagctgaatatgatgatcagaccagtcaaagggagaaagaagatgataaagtcttccctggtggaagccatacatatgtctggcaggtcctgaaagagaatggtccaatggcctctgacccactgtgccttacctactcatatctttctcatgtggacctggtaaaagacttgaattcaggcctcattggagccctactagtatgtagagaagggagtctggccaaggaaaagacacagaccttgcacaaatttatactactttttgctgtatttgatgaagggaaaagttggcactcagaaacaaagaactccttgatgcaggatagggatgctgcatctgctcgggcctggcctaaaatgcacacagtcaatggttatgtaaacaggtctctgccaggtctgattggatgccacaggaaatcagtctattggcatgtgattggaatgggcaccactcctgaagtgcactcaatattcctcgaaggtcacacatttcttgtgaggaaccatcgccaggcgtccttggaaatctcgccaataactttccttactgctcaaacactcttgatggaccttggacagtttctactgttttgtcatatctcttcccaccaacatgatggcatggaagcttatgtcaaagtagacagctgtccagaggaaccccaactacgaatgaaaaataatgaagaagcggaagactatgatgatgatcttactgattctgaaatggatgtggtcaggtttgatgatgacaactctccttcctttatccaaattcgctcagttgccaagaagcatcctaaaacttgggtacattacattgctgctgaagaggaggactgggactatgctcccttagtcctcgcccccgatgacagaagttataaaagtcaatatttgaacaatggccctcagcggattggtaggaagtacaaaaaagtccgatttatggcatacacagatgaaacctttaagactcgtgaagctattcagcatgaatcaggaatcttgggacctttactttatggggaagttggagacacactgttgattatatttaagaatcaagcaagcagaccatataacatctaccctcacggaatcactgatgtccgtcctttgtattcaaggagattaccaaaaggtgtaaaacatttgaaggattttccaattctgccaggagaaatattcaaatataaatggacagtgactgtagaagatgggccaactaaatcagatcctcggtgcctgacccgctattactctagtttcgttaatatggagagagatctagcttcaggactcattggccctctcctcatctgctacaaagaatctgtagatcaaagaggaaaccagataatgtcagacaagaggaatgtcatcctgttttctgtatttgatgagaaccgaagctggtacctcacagagaatatacaacgctttctccccaatccagctggagtgcagcttgaggatccagagttccaagcctccaacatcatgcacagcatcaatggctatgtttttgatagtttgcagttgtcagtttgtttgcatgaggtggcatactggtacattctaagcattggagcacagactgacttcctttctgtcttcttctctggatataccttcaaacacaaaatggtctatgaagacacactcaccctattcccattctcaggagaaactgtcttcatgtcgatggaaaacccaggtctatggattctggggtgccacaactcagactttcggaacagaggcatgaccgccttactgaaggtttctagttgtgacaagaacactggtgattattacgaggacagttatgaagatatttcagcatacttgctgagtaaaaacaatgccattgaaccaagaagcttctcccagaattcaagacaccctagcactaggcaaaagcaatttaatgccaccacaattccagaaaatgacatagagaagactgacccttggtttgcacacagaacacctatgcctaaaatacaaaatgtctcctctagtgatttgttgatgctcttgcgacagagtcctactccacatgggctatccttatctgatctccaagaagccaaatatgagactttttctgatgatccatcacctggagcaatagacagtaataacagcctgtctgaaatgacacacttcaggccacagctccatcacagtggggacatggtatttacccctgagtcaggcctccaattaagattaaatgagaaactggggacaactgcagcaacagagttgaagaaacttgatttcaaagtttctagtacatcaaataatctgatttcaacaattccatcagacaatttggcagcaggtactgataatacaagttccttaggacccccaagtatgccagttcattatgatagtcaattagataccactctatttggcaaaaagtcatctccccttactgagtctggtggacctctgagcttgagtgaagaaaataatgattcaaagttgttagaatcaggtttaatgaatagccaagaaagttcatggggaaaaaatgtatcgtcaacagagagtggtaggttatttaaagggaaaagagctcatggacctgctttgttgactaaagataatgccttattcaaagttagcatctctttgttaaagacaaacaaaacttccaataattcagcaactaatagaaagactcacattgatggcccatcattattaattgagaatagtccatcagtctggcaaaatatattagaaagtgacactgagtttaaaaaagtgacacctttgattcatgacagaatgcttatggacaaaaatgctacagctttgaggctaaatcatatgtcaaataaaactacttcatcaaaaaacatggaaatggtccaacagaaaaaagagggccccattccaccagatgcacaaaatccagatatgtcgttctttaagatgctattcttgccagaatcagcaaggtggatacaaaggactcatggaaagaactctctgaactctgggcaaggccccagtccaaagcaattagtatccttaggaccagaaaaatctgtggaaggtcagaatttcttgtctgagaaaaacaaagtggtagtaggaaagggtgaatttacaaaggacgtaggactcaaagagatggtttttccaagcagcagaaacctatttcttactaacttggataatttacatgaaaataatacacacaatcaagaaaaaaaaattcaggaagaaatagaaaagaaggaaacattaatccaagagaatgtagttttgcctcagatacatacagtgactggcactaagaatttcatgaagaaccttttcttactgagcactaggcaaaatgtagaaggttcatatgacggggcatatgctccagtacttcaagattttaggtcattaaatgattcaacaaatagaacaaagaaacacacagctcatttctcaaaaaaaggggaggaagaaaacttggaaggcttgggaaatcaaaccaagcaaattgtagagaaatatgcatgcaccacaaggatatctcctaatacaagccagcagaattttgtcacgcaacgtagtaagagagctttgaaacaattcagactcccactagaagaaacagaacttgaaaaaaggataattgtggatgacacctcaacccagtggtccaaaaacatgaaacatttgaccccgagcaccctcacacagatagactacaatgagaaggagaaaggggccattactcagtctcccttatcagattgccttacgaggagtcatagcatccctcaagcaaatagatctccattacccattgcaaaggtatcatcatttccatctattagacctatatatctgaccagggtcctattccaagacaactcttctcatcttccagcagcatcttatagaaagaaagattctggggtccaagaaagcagtcatttcttacaaggagccaaaaaaaataacctttctttagccattctaaccttggagatgactggtgatcaaagagaggttggctccctggggacaagtgccacaaattcagtcacatacaagaaagttgagaacactgttctcccgaaaccagacttgcccaaaacatctggcaaagttgaattgcttccaaaagttcacatttatcagaaggacctattccctacggaaactagcaatgggtctcctggccatctggatctcgtggaagggagccttcttcagggaacagagggagcgattaagtggaatgaagcaaacagacctggaaaagttccctttctgagagtagcaacagaaagctctgcaaagactccctccaagctattggatcctcttgcttgggataaccactatggtactcagataccaaaagaagagtggaaatcccaagagaagtcaccagaaaaaacagcttttaagaaaaaggataccattttgtccctgaacgcttgtgaaagcaatcatgcaatagcagcaataaatgagggacaaaataagcccgaaatagaagtcacctgggcaaagcaaggtaggactgaaaggctgtgctctcaaaacccaccagtcttgaaacgccatcaacgggaaataactcgtactactcttcagtcagatcaagaggaaattgactatgatgataccatatcagttgaaatgaagaaggaagattttgacatttatgatgaggatgaaaatcagagcccccgcagctttcaaaagaaaacacgacactattttattgctgcagtggagaggctctgggattatgggatgagtagctccccacatgttctaagaaacagggctcagagtggcagtgtccctcagttcaagaaagttgttttccaggaatttactgatggctcctttactcagcccttataccgtggagaactaaatgaacatttgggactcctggggccatatataagagcagaagttgaagataatatcatggtaactttcagaaatcaggcctctcgtccctattccttctattctagccttatttcttatgaggaagatcagaggcaaggagcagaacctagaaaaaactttgtcaagcctaatgaaaccaaaacttacttttggaaagtgcaacatcatatggcacccactaaagatgagtttgactgcaaagcctgggcttatttctctgatgttgacctggaaaaagatgtgcactcaggcctgattggaccccttctggtctgccacactaacacactgaaccctgctcatgggagacaagtgacagtacaggaatttgctctgtttttcaccatctttgatgagaccaaaagctggtacttcactgaaaatatggaaagaaactgcagggctccctgcaatatccagatggaagatcccacttttaaagagaattatcgcttccatgcaatcaatggctacataatggatacactacctggcttagtaatggctcaggatcaaaggattcgatggtatctgctcagcatgggcagcaatgaaaacatccattctattcatttcagtggacatgtgttcactgtacgaaaaaaagaggagtataaaatggcactgtacaatctctatccaggtgtttttgagacagtggaaatgttaccatccaaagctggaatttggcgggtggaatgccttattggcgagcatctacatgctgggatgagcacactttttctggtgtacagcaataagtgtcagactcccctgggaatggcttctggacacattagagattttcagattacagcttcaggacaatatggacagtgggccccaaagctggccagacttcattattccggatcaatcaatgcctggagcaccaaggagcccttttcttggatcaaggtggatctgttggcaccaatgattattcacggcatcaagacccagggtgcccgtcagaagttctccagcctctacatctctcagtttatcatcatgtatagtcttgatgggaagaagtggcagacttatcgaggaaattccactggaaccttaatggtcttctttggcaatgtggattcatctgggataaaacacaatatttttaaccctccaattattgctcgatacatccgtttgcacccaactcattatagcattcgcagcactcttcgcatggagttgatgggctgtgatttaaatagttgcagcatgccattgggaatggagagtaaagcaatatcagatgcacagattactgcttcatcctactttaccaatatgtttgccacctggtctccttcaaaagctcgacttcacctccaagggaggagtaatgcctggagacctcaggtgaataatccaaaagagtggctgcaagtggacttccagaagacaatgaaagtcacaggagtaactactcagggagtaaaatctctgcttaccagcatgtatgtgaaggagttcctcatctccagcagtcaagatggccatcagtggactctcttttttcagaatggcaaagtaaaggtttttcagggaaatcaagactccttcacacctgtggtgaactctctagacccaccgttactgactcgctaccttcgaattcacccccagagttgggtgcaccagattgccctgaggatggaggttctgggctgcgaggcacaggacctctactgattaattaataaaatacagcatagcaaaactttaacctccaaatcaagcctctacttgaatccttttctgagggatgaataaggcataggcatcaggggctgttgccaatgtgcattagctgtttgcagcctcaccttctttcatggagtttaagatatagtgtattttcccaaggtttgaactagctcttcatttctttatgttttaaatgcactgacctcccacattccctttttagtaaaatattcagaaataatttaaatacatcattgcaatgaaaataaatgttttttattaggcagaatccagatgctcaaggcccttcataatatcccccagtttagtagttggacttagggaacaaaggaacctttaatagaaattggacagcaagaaagcgagctccataaagtaggaaacactacacgattccataaagtaggaaacactacatcactccataaagtaggaaacactacacagacatgataagatacattgatgagtttggacaaaccacaactagaatgcagtgaaaaaaatgctttatttgtgaaatttgtgatgctattgctttatttgtaaccattataagctgcaataaacaagttaacaacaacaattgcattcattttatgtttcaggttcagggggagatgtgggaggttttttaaagcaagtaaaacctctacaaatgtggtacttaagcatggctacgtagataagtagcatggcgggttaatcattaactacacctgcaggaggaacccctagtgatggagttggccactccctctctgcgcgctcgctcgctcactgaggccgggcgaccaaaggtcgcccgacgcccgggcggcctcagtgagcgagcgagcgcgcagctgcctgcaggggcgcgccgctagcagctgatgcatagcatgcggtaccgggagatgggggaggctaactgaaacacggaaggagacaataccggaaggaacccgcgctatgacggcaataaaaagacagaataaaacgcacgggtgttgggtcgtttgttcataaacgcggggttcggtcccagggctggcactctgtcgataccccaccgagaccccattgggaccaatacgcccgcgtttcttccttttccccaccccaacccccaagttcgggtgaaggcccagggctcgcagccaacgtcggggcggcaagccctgccatagccactacgggtacgtaggccaaccactagaactatagctagagtcctgggcgaacaaacgatgctcgccttccagaaaaccgaggatgcgaaccacttcatccggggtcagcaccaccggcaagcgccgcgacggccgaggtctaccgatctcctgaagccagggcagatccgtgcacagcaccttgccgtagaagaacagcaaggccgccaatgcctgacgatgcgtggagaccgaaaccttgcgctcgttcgccagccaggacagaaatgcctcgacttcgctgctgcccaaggttgccgggtgacgcacaccgtggaaacggatgaaggcacgaacccagttgacataagcctgttcggttcgtaaactgtaatgcaagtagcgtatgcgctcacgcaactggtccagaaccttgaccgaacgcagcggtggtaacggcgcagtggcggttttcatggcttgttatgactgtttttttgtacagtctatgcctcgggcatccaagcagcaagcgcgttacgccgtgggtcgatgtttgatgttatggagcagcaacgatgttacgcagcagcaacgatgttacgcagcagggcagtcgccctaaaacaaagttaggtggctcaagtatgggcatcattcgcacatgtaggctcggccctgaccaagtcaaatccatgcgggctgctcttgatcttttcggtcgtgagttcggagacgtagccacctactcccaacatcagccggactccgattacctcgggaacttgctccgtagtaagacattcatcgcgcttgctgccttcgaccaagaagcggttgttggcgctctcgcggcttacgttctgcccaggtttgagcagccgcgtagtgagatctatatctatgatctcgcagtctccggcgagcaccggaggcagggcattgccaccgcgctcatcaatctcctcaagcatgaggccaacgcgcttggtgcttatgtgatctacgtgcaagcagattacggtgacgatcccgcagtggctctctatacaaagttgggcatacgggaagaagtgatgcactttgatatcgacccaagtaccgccacctaacaattcgttcaagccgagatcggcttcccggccgcggagttgttcggtaaattgtcacaacgccgcgaatatagtctttaccatgcccttggccacgcccctctttaatacgacgggcaatttgcacttcagaaaatgaagagtttgctttagccataacaaaagtccagtatgctttttcacagcataactggactgatttcagtttacaactattctgtctagtttaagactttattgtcatagtttagatctattttgttcagtttaagactttattgtccgcccacacccgcttacgcagggcatccatttattactcaaccgtaaccgattttgccaggttacgcggctggtctgcggtgtgaaataccgcacagatgcgtaaggagaaaataccgcatcaggcgctcttccgcttcctcgctcactgactcgctgcgctcggtcgttcggctgcggcgagcggtatcagctcactcaaaggcggtaatacggttatccacagaatcaggggataacgcaggaaagaacatgtgagcaaaaggccagcaaaaggccaggaaccgtaaaaaggccgcgttgctggcgtttttccataggctccgcccccctgacgagcatcacaaaaatcgacgctcaagtcagaggtggcgaaacccgacaggactataaagataccaggcgtttccccctggaagctccctcgtgcgctctcctgttccgaccctgccgcttaccggatacctgtccgcctttctcccttcgggaagcgtggcgctttctcaatgctcacgctgtaggtatctcagttcggtgtaggtcgttcgctccaagctgggctgtgtgcacgaaccccccgttcagcccgaccgctgcgccttatccggtaactatcgtcttgagtccaacccggtaagacacgacttatcgccactggcagcagccactggtaacaggattagcagagcgaggtatgtaggcggtgctacagagttcttgaagtggtggcctaactacggctacactagaaggacagtatttggtatctgcgctctgctgaagccagttaccttcggaaaaagagttggtagctcttgatccggcaaacaaaccaccgctggtagcggtggtttttttgtttgcaagcagcagattacgcgcagaaaaaaaggatctcaagaagatcctttgatcttttctacggggtctgacgctcagtggaacgaaaactcacgttaagggattttggtcatgagattatcaaaaaggatcttcacctagatccttttaaattaaaaatgaagttttaaatcaatctaaagtatatatgagtaaacttggtctgacagttaccaatgcttaatcagtgaggcacctatctcagcgatctgtctatttcgttcatccatagttgcctgactccccgtcgtgtagataactacgatacgggagggcttaccatctggccccagtgctgcaatgataccgcgagacccacgctcaccggctccagatttatcagcaataaaccagccagccggaagggccgagcgcagaagtggtcctgcaactttatccgcctccatccagtctattaattgttgccgggaagctagagtaagtagttcgccagttaatagtttgcgcaacgttgttgccattgctacaggcatcgtggtgtcacgctcgtcgtttggtatggcttcattcagctccggttcccaacgatcaaggcgagttacatgatcccccatgttgtgcaaaaaagcggttagctccttcggtcctccgatcgttgtcagaagtaagttggccgcagtgttatcactcatggttatggcagcactgcataattctcttactgtcatgccatccgtaagatgcttttctgtgactggtgagtactcaaccaagtcattctgagaatagtgtatgcggcgaccgagttgctcttgcccggcgtcaatacgggataataccgcgccacatagcagaactttaaaagtgctcatcattggaaaacgttcttcggggcgaaaactctcaaggatcttaccgctgttgagatccagttcgatgtaacccactcgtgcacccaactgatcttcagcatcttttactttcaccagcgtttctgggtgagcaaaaacaggaaggcaaaatgccgcaaaaaagggaataagggcgacacggaaatgttgaatactcatactcttcctttttcaatattattgaagcatttatcagggttattgtctcatgagcggatacatatttgaatgtatttagaaaaataaacaaataggggttccgcgcacatttccccgaaaagtgccacctgaaattgtaaacgttaatattttgttaaaattcgcgttaaatttttgttaaatcagctcattttttaaccaataggccgaaatcggcaaaatcccttataaatcaaaagaatagaccgagatagggttgagtgttgttccagtttggaacaagagtccactattaaagaacgtggactccaacgtcaaagggcgaaaaaccgtctatcagggcgatggcccactacgtgaaccatcaccctaatcaagttttttggggtcgaggtgccgtaaagcactaaatcggaaccctaaagggagcccccgatttagagcttgacggggaaagccggcgaacgtggcgagaaaggaagggaagaaagcgaaaggagcgggcgctagggcgctggcaagtgtagcggtcacgctgcgcgtaaccaccacacccgccgcgcttaatgcgccgctacagggcgcgtcccattcgccattcaggctgcaaataagcgttgatattcagtcaattacaaacattaataacgaagagatgacagaaaaattttcattctgtgacagagaa

SEQ ID NO: 218 - protein, 2351 aa, Homo sapiens
MQIELSTCFFLCLLRFCFSATRRYYLGAVELSWDYMQSDLGELPVDARFPPRVPKSFPFNTSVVYKKTLFVEFTDHLFNIAKPRPPWMGLLGPTIQAEVYDTVVITLKNMASHPVSLHAVGVSYWKASEGAEYDDQTSQREKEDDKVFPGGSHTYVWQVLKENGPMASDPLCLTYSYLSHVDLVKDLNSGLIGALLVCREGSLAKEKTQTLHKFILLFAVFDEGKSWHSETKNSLMQDRDAASARAWPKMHTVNGYVNRSLPGLIGCHRKSVYWHVIGMGTTPEVHSIFLEGHTFLVRNHRQASLEISPITFLTAQTLLMDLGQFLLFCHISSHQHDGMEAYVKVDSCPEEPQLRMKNNEEAEDYDDDLTDSEMDVVRFDDDNSPSFIQIRSVAKKHPKTWVHYIAAEEEDWDYAPLVLAPDDRSYKSQYLNNGPQRIGRKYKKVRFMAYTDETFKTREAIQHESGILGPLLYGEVGDTLLIIFKNQASRPYNIYPHGITDVRPLYSRRLPKGVKHLKDFPILPGEIFKYKWTVTVEDGPTKSDPRCLTRYYSSFVNMERDLASGLIGPLLICYKESVDQRGNQIMSDKRNVILFSVFDENRSWYLTENIQRFLPNPAGVQLEDPEFQASNIMHSINGYVFDSLQLSVCLHEVAYWYILSIGAQTDFLSVFFSGYTFKHKMVYEDTLTLFPFSGETVFMSMENPGLWILGCHNSDFRNRGMTALLKVSSCDKNTGDYYEDSYEDISAYLLSKNNAIEPRSFSQNSRHPSTRQKQFNATTIPENDIEKTDPWFAHRTPMPKIQNVSSSDLLMLLRQSPTPHGLSLSDLQEAKYETFSDDPSPGAIDSNNSLSEMTHFRPQLHHSGDMVFTPESGLQLRLNEKLGTTAATELKKLDFKVSSTSNNLISTIPSDNLAAGTDNTSSLGPPSMPVHYDSQLDTTLFGKKSSPLTESGGPLSLSEENNDSKLLESGLMNSQESSWGKNVSSTESGRLFKGKRAHGPALLTKDNALFKVSISLLKTNKTSNNSATNRKTHIDGPSLLIENSPSVWQNILESDTEFKKVTPLIHDRMLMDKNATALRLNHMSNKTTSSKNMEMVQQKKEGPIPPDAQNPDMSFFKMLFLPESARWIQRTHGKNSLNSGQGPSPKQLVSLGPEKSVEGQNFLSEKNKVVVGKGEFTKDVGLKEMVFPSSRNLFLTNLDNLHENNTHNQEKKIQEEIEKKETLIQENVVLPQIHTVTGTKNFMKNLFLLSTRQNVEGSYDGAYAPVLQDFRSLNDSTNRTKKHTAHFSKKGEEENLEGLGNQTKQIVEKYACTTRISPNTSQQNFVTQRSKRALKQFRLPLEETELEKRIIVDDTSTQWSKNMKHLTPSTLTQIDYNEKEKGAITQSPLSDCLTRSHSIPQANRSPLPIAKVSSFPSIRPIYLTRVLFQDNSSHLPAASYRKKDSGVQESSHFLQGAKKNNLSLAILTLEMTGDQREVGSLGTSATNSVTYKKVENTVLPKPDLPKTSGKVELLPKVHIYQKDLFPTETSNGSPGHLDLVEGSLLQGTEGAIKWNEANRPGKVPFLRVATESSAKTPSKLLDPLAWDNHYGTQIPKEEWKSQEKSPEKTAFKKKDTILSLNACESNHAIAAINEGQNKPEIEVTWAKQGRTERLCSQNPPVLKRHQREITRTTLQSDQEEIDYDDTISVEMKKEDFDIYDEDENQSPRSFQKKTRHYFIAAVERLWDYGMSSSPHVLRNRAQSGSVPQFKKVVFQEFTDGSFTQPLYRGELNEHLGLLGPYIRAEVEDNIMVTFRNQASRPYSFYSSLISYEEDQRQGAEPRKNFVKPNETKTYFWKVQHHMAPTKDEFDCKAWAYFSDVDLEKDVHSGLIGPLLVCHTNTLNPAHGRQVTVQEFALFFTIFDETKSWYFTENMERNCRAPCNIQMEDPTFKENYRFHAINGYIMDTLPGLVMAQDQRIRWYLLSMGSNENIHSIHFSGHVFTVRKKEEYKMALYNLYPGVFETVEMLPSKAGIWRVECLIGEHLHAGMSTLFLVYSNKCQTPLGMASGHIRDFQITASGQYGQWAPKLARLHYSGSINAWSTKEPFSWIKVDLLAPMIIHGIKTQGARQKFSSLYISQFIIMYSLDGKKWQTYRGNSTGTLMVFFGNVDSSGIKHNIFNPPIIARYIRLHPTHYSIRSTLRMELMGCDLNSCSMPLGMESKAISDAQITASSYFTNMFATWSPSKARLHLQGRSNAWRPQVNNPKEWLQVDFQKTMKVTGVTTQGVKSLLTSMYVKEFLISSSQDGHQWTLFFQNGKVKVFQGNQDSFTPVVNSLDPPLLTRYLRIHPQSWVHQIALRMEVLGCEAQDLY

SEQ ID NO: 219-379 - skipped (161 entries)

SEQ ID NO: 380 - DNA, 4374 bp, synthetic construct
  misc_feature 1..4374: note = Description of Artificial Sequence: Synthetic polynucleotide
  source 1..4374: mol_type = other DNA
atgcagattgagctgagcacctgcttcttcctgtgcctgctgaggttctgcttctctgccaccaggagatactacctgggggctgtggagctgagctgggactacatgcagtctgacctgggggagctgcctgtggatgccaggttcccccccagagtgcccaagagcttccccttcaacacctctgtggtgtacaagaagaccctgtttgtggagttcactgaccacctgttcaacattgccaagcccaggcccccctggatgggcctgctgggccccaccatccaggctgaggtgtatgacactgtggtgatcaccctgaagaacatggccagccaccctgtgagcctgcatgctgtgggggtgagctactggaaggcctctgagggggctgagtatgatgaccagaccagccagagggagaaggaggatgacaaggtgttccctgggggcagccacacctatgtgtggcaggtgctgaaggagaatggccccatggcctctgaccccctgtgcctgacctacagctacctgagccatgtggacctggtgaaggacctgaactctggcctgattggggccctgctggtgtgcagggagggcagcctggccaaggagaagacccagaccctgcacaagttcatcctgctgtttgctgtgtttgatgagggcaagagctggcactctgaaaccaagaacagcctgatgcaggacagggatgctgcctctgccagggcctggcccaagatgcacactgtgaatggctatgtgaacaggagcctgcctggcctgattggctgccacaggaagtctgtgtactggcatgtgattggcatgggcaccacccctgaggtgcacagcatcttcctggagggccacaccttcctggtcaggaaccacaggcaggccagcctggagatcagccccatcaccttcctgactgcccagaccctgctgatggacctgggccagttcctgctgttctgccacatcagcagccaccagcatgatggcatggaggcctatgtgaaggtggacagctgccctgaggagccccagctgaggatgaagaacaatgaggaggctgaggactatgatgatgacctgactgactctgagatggatgtggtgaggtttgatgatgacaacagccccagcttcatccagatcaggtctgtggccaagaagcaccccaagacctgggtgcactacattgctgctgaggaggaggactgggactatgcccccctggtgctggcccctgatgacaggagctacaagagccagtacctgaacaatggcccccagaggattggcaggaagtacaagaaggtcaggttcatggcctacactgatgaaaccttcaagaccagggaggccatccagcatgagtctggcatcctgggccccctgctgtatggggaggtgggggacaccctgctgatcatcttcaagaaccaggccagcaggccctacaacatctacccccatggcatcactgatgtgaggcccctgtacagcaggaggctgcccaagggggtgaagcacctgaaggacttccccatcctgcctggggagatcttcaagtacaagtggactgtgactgtggaggatggccccaccaagtctgaccccaggtgcctgaccagatactacagcagctttgtgaacatggagagggacctggcctctggcctgattggccccctgctgatctgctacaaggagtctgtggaccagaggggcaaccagatcatgtctgacaagaggaatgtgatcctgttctctgtgtttgatgagaacaggagctggtacctgactgagaacatccagaggttcctgcccaaccctgctggggtgcagctggaggaccctgagttccaggccagcaacatcatgcacagcatcaatggctatgtgtttgacagcctgcagctgtctgtgtgcctgcatgaggtggcctactggtacatcctgagcattggggcccagactgacttcctgtctgtgttcttctctggctacaccttcaagcacaagatggtgtatgaggacaccctgaccctgttccccttctctggggagactgtgttcatgagcatggagaaccctggcctgtggattctgggctgccacaactctgacttcaggaacaggggcatgactgccctgctgaaagtctccagctgtgacaagaacactggggactactatgaggacagctatgaggacatctctgcctacctgctgagcaagaacaatgccattgagcccaggagcttcagccagaaccccccagtgctgaagaggcaccagagggagatcaccaggaccaccctgcagtctgaccaggaggagattgactatgatgacaccatctctgtggagatgaagaaggaggactttgacatctacgacgaggacgagaaccagagccccaggagcttccagaagaagaccaggcactacttcattgctgctgtggagaggctgtgggactatggcatgagcagcagcccccatgtgctgaggaacagggcccagtctggctctgtgccccagttcaagaaggtggtgttccaggagttcactgatggcagcttcacccagcccctgtacagaggggagctgaatgagcacctgggcctgctgggcccctacatcagggctgaggtggaggacaacatcatggtgaccttcaggaaccaggccagcaggccctacagcttctacagcagcctgatcagctatgaggaggaccagaggcagggggctgagcccaggaagaactttgtgaagcccaatgaaaccaagacctacttctggaaggtgcagcaccacatggcccccaccaaggatgagtttgactgcaaggcctgggcctacttctctgatgtggacctggagaaggatgtgcactctggcctgattggccccctgctggtgtgccacaccaacaccctgaaccctgcccatggcaggcaggtgactgtgcaggagtttgccctgttcttcaccatctttgatgaaaccaagagctggtacttcactgagaacatggagaggaactgcagggccccctgcaacatccagatggaggaccccaccttcaaggagaactacaggttccatgccatcaatggctacatcatggacaccctgcctggcctggtgatggcccaggaccagaggatcaggtggtacctgctgagcatgggcagcaatgagaacatccacagcatccacttctctggccatgtgttcactgtgaggaagaaggaggagtacaagatggccctgtacaacctgtaccctggggtgtttgagactgtggagatgctgcccagcaaggctggcatctggagggtggagtgcctgattggggagcacctgcatgctggcatgagcaccctgttcctggtgtacagcaacaagtgccagacccccctgggcatggcctctggccacatcagggacttccagatcactgcctctggccagtatggccagtgggcccccaagctggccaggctgcactactctggcagcatcaatgcctggagcaccaaggagcccttcagctggatcaaggtggacctgctggcccccatgatcatccatggcatcaagacccagggggccaggcagaagttcagcagcctgtacatcagccagttcatcatcatgtacagcctggatggcaagaagtggcagacctacaggggcaacagcactggcaccctgatggtgttctttggcaatgtggacagctctggcatcaagcacaacatcttcaacccccccatcattgccagatacatcaggctgcaccccacccactacagcatcaggagcaccctgaggatggagctgatgggctgtgacctgaacagctgcagcatgcccctgggcatggagagcaaggccatctctgatgcccagatcactgccagcagctacttcaccaacatgtttgccacctggagccccagcaaggccaggctgcacctgcagggcaggagcaatgcctggaggccccaggtcaacaaccccaaggagtggctgcaggtggacttccagaagaccatgaaggtgactggggtgaccacccagggggtgaagagcctgctgaccagcatgtatgtgaaggagttcctgatcagcagcagccaggatggccaccagtggaccctgttcttccagaatggcaaggtgaaggtgttccagggcaaccaggacagcttcacccctgtggtgaacagcctggacccccccctgctgaccagatacctgaggattcacccccagagctgggtgcaccagattgccctgaggatggaggtgctgggctgtgaggcccaggacctgtactga

SEQ ID NO: 381 - DNA, 4374 bp, synthetic construct
  misc_feature 1..4374: note = Description of Artificial Sequence: Synthetic polynucleotide
  source 1..4374: mol_type = other DNA
atgcagattgagctgagcacctgcttcttcctgtgtctgctgaggttctgcttctctgccaccaggaggtattacctgggggctgtggagctgagctgggactatatgcagtctgacctgggggagctgcctgtggatgctaggttcccccccagggtgcccaagagcttcccctttaacacttctgtggtgtacaagaagaccctgtttgtggagttcactgaccacctgttcaacattgccaagcccaggcccccctggatggggctgctggggcccaccatccaggctgaggtgtatgacactgtggtgatcaccctgaagaacatggccagccaccctgtgagcctgcatgctgtgggggtgagctactggaaggcttctgagggggctgagtatgatgaccagactagccagagggagaaggaggatgacaaggtgtttcctgggggcagccatacctatgtgtggcaggtgctgaaggagaatggccccatggcctctgaccccctgtgcctgacctacagctacctgtctcatgtggacctggtgaaggacctgaactctggcctgattggggctctgctggtgtgtagggagggcagcctggctaaggaaaagacccagaccctgcataagtttatcctgctgtttgctgtgtttgatgagggcaagagctggcactctgagaccaagaacagcctgatgcaggatagggatgctgcctctgccagggcttggcctaagatgcacactgtgaatgggtatgtgaataggagcctgcctggcctgattggctgccacaggaagtctgtgtactggcatgtgattgggatgggcaccacccctgaggtccatagcatcttcctggagggccacactttcctggtgaggaaccacagacaggcctctctggagatctctcccatcaccttcctgactgctcagactctgctgatggacctgggccagttcctgctgttttgccatattagcagccaccagcatgatgggatggaggcctatgtgaaggtggatagctgccctgaggagcctcagctgaggatgaagaacaatgaggaggctgaagactatgatgatgacctgactgattctgagatggatgtggtgaggtttgatgatgacaatagccccagcttcattcagatcaggtctgtggccaagaaacaccccaagacctgggtgcactacattgctgctgaggaagaggactgggactatgctcccctggtgctggcccctgatgataggtcttataagagccagtacctgaacaatgggccccagaggattggcaggaagtacaagaaggtgaggttcatggcctacactgatgaaaccttcaaaaccagggaggccattcagcatgagtctggcatcctgggccctctgctgtatggggaggtgggggacaccctgctgatcatcttcaagaaccaggccagcaggccctacaacatctatcctcatggcatcactgatgtgaggcccctgtacagcaggaggctgcccaagggggtgaagcacctgaaagacttccccatcctgcctggggagatctttaagtataagtggactgtgactgtggaggatggccctaccaagtctgaccccaggtgtctgaccaggtactattctagctttgtgaacatggagagggacctggcctctggcctgattgggcccctgctgatctgctacaaggagtctgtggaccagaggggcaaccagatcatgtctgacaagaggaatgtgatcctgttttctgtgtttgatgagaataggagctggtacctgactgagaacatccagaggtttctgcccaatcctgctggggtgcagctggaggatcctgagttccaggccagcaatatcatgcatagcatcaatggctatgtgtttgacagcctgcagctgtctgtgtgcctgcatgaggtggcctactggtacatcctgagcattggggcccagactgactttctgtctgtgttcttttctggctataccttcaagcacaagatggtgtatgaggataccctgaccctgttccccttctctggggagactgtgttcatgagcatggagaatcctgggctgtggatcctggggtgccacaactctgattttaggaacagggggatgactgccctgctgaaggtgtctagctgtgataagaacactggggactactatgaggacagctatgaggacatttctgcttatctgctgtctaagaataatgccattgagcccagaagcttcagccagaatccccctgtgctgaagagacatcagagggagatcaccagaactaccctgcagtctgatcaggaggagattgactatgatgacactatctctgtggagatgaagaaggaggactttgacatctatgatgaggatgagaatcagtctcccaggagctttcagaagaagaccagacattacttcattgctgctgtggagaggctgtgggactatggcatgagctctagccctcatgtgctgaggaacagggcccagtctggctctgtgccccagttcaagaaggtggtgttccaggaattcactgatggcagcttcacccagcccctgtacaggggggagctgaatgagcacctgggcctgctggggccttatatcagggctgaggtggaggataatattatggtgactttcaggaaccaggccagcaggccctactctttctatagcagcctgatctcttatgaggaggatcagaggcagggggctgagcctaggaagaactttgtgaagcccaatgagactaagacctacttctggaaggtccagcaccacatggcccctaccaaggatgagtttgactgcaaggcctgggcctatttctctgatgtggatctggagaaggatgtccattctgggctgattggccccctgctggtgtgccacactaacactctgaatcctgcccatggcaggcaggtgactgtccaggagtttgccctgttcttcactatctttgatgagaccaagagctggtactttactgagaacatggagaggaactgcagagctccttgcaatattcagatggaggaccccaccttcaaggagaattacaggttccatgccattaatgggtacatcatggacaccctgcctggcctggtgatggctcaggaccagaggatcaggtggtacctgctgagcatgggctctaatgagaatatccacagcatccacttctctgggcatgtgttcactgtgaggaagaaggaggagtacaagatggctctgtataatctgtaccctggggtgtttgaaactgtggagatgctgccctctaaggctggcatctggagggtggagtgcctgattggggagcacctgcatgctggcatgagcaccctgttcctggtgtacagcaacaagtgccagacccccctgggcatggcctctggccacatcagggacttccagatcactgcctctggccagtatggccagtgggcccccaagctggccaggctgcactattctggcagcatcaatgcctggagcaccaaggagcccttcagctggatcaaggtggacctgctggcccccatgatcattcatggcatcaagacccagggggccaggcagaagttcagctctctgtacatctctcagttcatcatcatgtactctctggatgggaagaagtggcagacctacaggggcaacagcactggcaccctgatggtgttctttgggaatgtggactcttctggcatcaagcacaacatcttcaatccccccatcattgctaggtatattaggctgcatcccacccactacagcatcaggtctaccctgaggatggagctgatgggctgtgacctgaactcttgcagcatgcccctgggcatggagtctaaggccatctctgatgcccagattactgccagcagctacttcaccaacatgtttgccacctggagcccctctaaggccaggctgcatctgcaggggaggagcaatgcctggaggcctcaggtgaacaaccccaaggagtggctgcaggtggatttccagaagaccatgaaggtgactggggtgaccacccagggggtcaagagcctgctgaccagcatgtatgtgaaggagttcctgatcagcagcagccaggatggccaccagtggactctgttctttcagaatgggaaggtgaaggtgtttcagggcaatcaggactctttcacccctgtggtgaacagcctggacccccccctgctgaccagatacctgaggatccacccccagtcttgggtgcatcagattgccctgaggatggaggtgctgggctgtgaggctcaggatctgtactga

SEQ ID NO: 382 - DNA, 4374 bp, synthetic construct
  misc_feature 1..4374: note = Description of Artificial Sequence: Synthetic polynucleotide
  source 1..4374: mol_type = other DNA
atgcagatcgagctctccacctgcttctttctgtgcctgttgagattctgcttcagcgccaccaggagatactacctgggggctgtggagctgagctgggactacatgcagtctgacctgggggagctgcctgtggatgccaggttcccccccagagtgcccaagagcttccccttcaacacctctgtggtgtacaagaagaccctgtttgtggagttcactgaccacctgttcaacattgccaagcccaggcccccctggatgggcctgctgggccccaccatccaggctgaggtgtatgacactgtggtgatcaccctgaagaacatggccagccaccctgtgagcctgcatgctgtgggggtgagctactggaaggcctctgagggggctgagtatgatgaccagaccagccagagggagaaggaggatgacaaggtgttccctgggggcagccacacctatgtgtggcaggtgctgaaggagaatggccccatggcctctgaccccctgtgcctgacctacagctacctgagccatgtggacctggtgaaggacctgaactctggcctgattggggccctgctggtgtgcagggagggcagcctggccaaggagaagacccagaccctgcacaagttcatcctgctgtttgctgtgtttgatgagggcaagagctggcactctgaaaccaagaacagcctgatgcaggacagggatgctgcctctgccagggcctggcccaagatgcacactgtgaatggctatgtgaacaggagcctgcctggcctgattggctgccacaggaagtctgtgtactggcatgtgattggcatgggcaccacccctgaggtgcacagcatcttcctggagggccacaccttcctggtcaggaaccacaggcaggccagcctggagatcagccccatcaccttcctgactgcccagaccctgctgatggacctgggccagttcctgctgttctgccacatcagcagccaccagcatgatggcatggaggcctatgtgaaggtggacagctgccctgaggagccccagctgaggatgaagaacaatgaggaggctgaggactatgatgatgacctgactgactctgagatggatgtggtgaggtttgatgatgacaacagccccagcttcatccagatcaggtctgtggccaagaagcaccccaagacctgggtgcactacattgctgctgaggaggaggactgggactatgcccccctggtgctggcccctgatgacaggagctacaagagccagtacctgaacaatggcccccagaggattggcaggaagtacaagaaggtcaggttcatggcctacactgatgaaaccttcaagaccagggaggccatccagcatgagtctggcatcctgggccccctgctgtatggggaggtgggggacaccctgctgatcatcttcaagaaccaggccagcaggccctacaacatctacccccatggcatcactgatgtgaggcccctgtacagcaggaggctgcccaagggggtgaagcacctgaaggacttccccatcctgcctggggagatcttcaagtacaagtggactgtgactgtggaggatggccccaccaagtctgaccccaggtgcctgaccagatactacagcagctttgtgaacatggagagggacctggcctctggcctgattggccccctgctgatctgctacaaggagtctgtggaccagaggggcaaccagatcatgtctgacaagaggaatgtgatcctgttctctgtgtttgatgagaacaggagctggtacctgactgagaacatccagaggttcctgcccaaccctgctggggtgcagctggaggaccctgagttccaggccagcaacatcatgcacagcatcaatggctatgtgtttgacagcctgcagctgtctgtgtgcctgcatgaggtggcctactggtacatcctgagcattggggcccagactgacttcctgtctgtgttcttctctggctacaccttcaagcacaagatggtgtatgaggacaccctgaccctgttccccttctctggggagactgtgttcatgagcatggagaaccctggcctgtggattctgggctgccacaactctgacttcaggaacaggggcatgactgccctgctgaaagtctccagctgtgacaagaacactggggactactatgaggacagctatgaggacatctctgcctacctgctgagcaagaacaatgccattgagcccaggagcttcagccagaatccacccgtccttaagcgccatcagcgcgagatcaccaggaccaccctgcagtctgaccaggaggagattgactatgatgacaccatctctgtggagatgaagaaggaggactttgacatctacgacgaggacgagaaccagagccccaggagcttccagaagaagaccaggcactacttcattgctgctgtggagaggctgtgggactatggcatgagcagcagcccccatgtgctgaggaacagggcccagtctggctctgtgccccagttcaagaaggtggtgttccaggagttcactgatggcagcttcacccagcccctgtacagaggggagctgaatgagcacctgggcctgctgggcccctacatcagggctgaggtggaggacaacatcatggtgaccttcaggaaccaggccagcaggccctacagcttctacagcagcctgatcagctatgaggaggaccagaggcagggggctgagcccaggaagaactttgtgaagcccaatgaaaccaagacctacttctggaaggtgcagcaccacatggcccccaccaaggatgagtttgactgcaaggcctgggcctacttctctgatgtggacctggagaaggatgtgcactctggcctgattggccccctgctggtgtgccacaccaacaccctgaaccctgcccatggcaggcaggtgactgtgcaggagtttgccctgttcttcaccatctttgatgaaaccaagagctggtacttcactgagaacatggagaggaactgcagggccccctgcaacatccagatggaggaccccaccttcaaggagaactacaggttccatgccatcaatggctacatcatggacaccctgcctggcctggtgatggcccaggaccagaggatcaggtggtacctgctgagcatgggcagcaatgagaacatccacagcatccacttctctggccatgtgttcactgtgaggaagaaggaggagtacaagatggccctgtacaacctgtaccctggggtgtttgagactgtggagatgctgcccagcaaggctggcatctggagggtggagtgcctgattggggagcacctgcatgctggcatgagcaccctgttcctggtgtacagcaacaagtgccagacccccctgggcatggcctctggccacatcagggacttccagatcactgcctctggccagtatggccagtgggcccccaagctggccaggctgcactactctggcagcatcaatgcctggagcaccaaggagcccttcagctggatcaaggtggacctgctggcccccatgatcatccatggcatcaagacccagggggccaggcagaagttcagcagcctgtacatcagccagttcatcatcatgtacagcctggatggcaagaagtggcagacctacaggggcaacagcactggcaccctgatggtgttctttggcaatgtggacagctctggcatcaagcacaacatcttcaacccccccatcattgccagatacatcaggctgcaccccacccactacagcatcaggagcaccctgaggatggagctgatgggctgtgacctgaacagctgcagcatgcccctgggcatggagagcaaggccatctctgatgcccagatcactgccagcagctacttcaccaacatgtttgccacctggagccccagcaaggccaggctgcatctgcagggcaggagcaatgcctggaggccccaggtcaacaaccccaaggagtggctgcaggtggacttccagaagaccatgaaggtgactggggtgaccacccagggggtgaagagcctgctgaccagcatgtatgtgaaggagttcctgatcagcagcagccaggatggccaccagtggaccctgttcttccagaatggcaaggtgaaggtgttccagggcaaccaggacagcttcacccctgtggtgaacagcctggacccccccctgctgaccagatacctgaggattcacccccagagctgggtgcaccagattgccctgaggatggaggtgctgggctgtgaggcccaggacctgtactga

SEQ ID NO: 383 - DNA, 7056 bp, Homo sapiens
  source 1..7056: mol_type = genomic DNA
atgcaaatagagctctccacctgcttctttctgtgccttttgcgattctgctttagtgccaccagaagatactacctgggtgcagtggaactgtcatgggactatatgcaaagtgatctcggtgagctgcctgtggacgcaagatttcctcctagagtgccaaaatcttttccattcaacacctcagtcgtgtacaaaaagactctgtttgtagaattcacggatcaccttttcaacatcgctaagccaaggccaccctggatgggtctgctaggtcctaccatccaggctgaggtttatgatacagtggtcattacacttaagaacatggcttcccatcctgtcagtcttcatgctgttggtgtatcctactggaaagcttctgagggagctgaatatgatgatcagaccagtcaaagggagaaagaagatgataaagtcttccctggtggaagccatacatatgtctggcaggtcctgaaagagaatggtccaatggcctctgacccactgtgccttacctactcatatctttctcatgtggacctggtaaaagacttgaattcaggcctcattggagccctactagtatgtagagaagggagtctggccaaggaaaagacacagaccttgcacaaatttatactactttttgctgtatttgatgaagggaaaagttggcactcagaaacaaagaactccttgatgcaggatagggatgctgcatctgctcgggcctggcctaaaatgcacacagtcaatggttatgtaaacaggtctctgccaggtctgattggatgccacaggaaatcagtctattggcatgtgattggaatgggcaccactcctgaagtgcactcaatattcctcgaaggtcacacatttcttgtgaggaaccatcgccaggcgtccttggaaatctcgccaataactttccttactgctcaaacactcttgatggaccttggacagtttctactgttttgtcatatctcttcccaccaacatgatggcatggaagcttatgtcaaagtagacagctgtccagaggaaccccaactacgaatgaaaaataatgaagaagcggaagactatgatgatgatcttactgattctgaaatggatgtggtcaggtttgatgatgacaactctccttcctttatccaaattcgctcagttgccaagaagcatcctaaaacttgggtacattacattgctgctgaagaggaggactgggactatgctcccttagtcctcgcccccgatgacagaagttataaaagtcaatatttgaacaatggccctcagcggattggtaggaagtacaaaaaagtccgatttatggcatacacagatgaaacctttaagactcgtgaagctattcagcatgaatcaggaatcttgggacctttactttatggggaagttggagacacactgttgattatatttaagaatcaagcaagcagaccatataacatctaccctcacggaatcactgatgtccgtcctttgtattcaaggagattaccaaaaggtgtaaaacatttgaaggattttccaattctgccaggagaaatattcaaatataaatggacagtgactgtagaagatgggccaactaaatcagatcctcggtgcctgacccgctattactctagtttcgttaatatggagagagatctagcttcaggactcattggccctctcctcatctgctacaaagaatctgtagatcaaagaggaaaccagataatgtcagacaagaggaatgtcatcctgttttctgtatttgatgagaaccgaagctggtacctcacagagaatatacaacgctttctccccaatccagctggagtgcagcttgaggatccagagttccaagcctccaacatcatgcacagcatcaatggctatgtttttgatagtttgcagttgtcagtttgtttgcatgaggtggcatactggtacattctaagcattggagcacagactgacttcctttctgtcttcttctctggatataccttcaaacacaaaatggtctatgaagacacactcaccctattcccattctcaggagaaactgtcttcatgtcgatggaaaacccaggtctatggattctggggtgccacaactcagactttcggaacagaggcatgaccgccttactgaaggtttctagttgtgacaagaacactggtgattattacgaggacagttatgaagatatttcagcatacttgctgagtaaaaacaatgccattgaaccaagaagcttctcccagaattcaagacaccctagcactaggcaaaagcaatttaatgccaccacaattccagaaaatgacatagagaagactgacccttggtttgcacacagaacacctatgcctaaaatacaaaatgtctcctctagtgatttgttgatgctcttgcgacagagtcctactccacatgggctatccttatctgatctccaagaagccaaatatgagactttttctgatgatccatcacctggagcaatagacagtaataacagcctgtctgaaatgacacacttcaggccacagctccatcacagtggggacatggtatttacccctgagtcaggcctccaattaagattaaatgagaaactggggacaactgcagcaacagagttgaagaaacttgatttcaaagtttctagtacatcaaataatctgatttcaacaattccatcagacaatttggcagcaggtactgataatacaagttccttaggacccccaagtatgccagttcattatgatagtcaattagataccactctatttggcaaaaagtcatctccccttactgagtctggtggacctctgagcttgagtgaagaaaataatgattcaaagttgttagaatcaggtttaatgaatagccaagaaagttcatggggaaaaaatgtatcgtcaacagagagtggtaggttatttaaagggaaaagagctcatggacctgctttgttgactaaagataatgccttattcaaagttagcatctctttgttaaagacaaacaaaacttccaataattcagcaactaatagaaagactcacattgatggcccatcattattaattgagaatagtccatcagtctggcaaaatatattagaaagtgacactgagtttaaaaaagtgacacctttgattcatgacagaatgcttatggacaaaaatgctacagctttgaggctaaatcatatgtcaaataaaactacttcatcaaaaaacatggaaatggtccaacagaaaaaagagggccccattccaccagatgcacaaaatccagatatgtcgttctttaagatgctattcttgccagaatcagcaaggtggatacaaaggactcatggaaagaactctctgaactctgggcaaggccccagtccaaagcaattagtatccttaggaccagaaaaatctgtggaaggtcagaatttcttgtctgagaaaaacaaagtggtagtaggaaagggtgaatttacaaaggacgtaggactcaaagagatggtttttccaagcagcagaaacctatttcttactaacttggataatttacatgaaaataatacacacaatcaagaaaaaaaaattcaggaagaaatagaaaagaaggaaacattaatccaagagaatgtagttttgcctcagatacatacagtgactggcactaagaatttcatgaagaaccttttcttactgagcactaggcaaaatgtagaaggttcatatgacggggcatatgctccagtacttcaagattttaggtcattaaatgattcaacaaatagaacaaagaaacacacagctcatttctcaaaaaaaggggaggaagaaaacttggaaggcttgggaaatcaaaccaagcaaattgtagagaaatatgcatgcaccacaaggatatctcctaatacaagccagcagaattttgtcacgcaacgtagtaagagagctttgaaacaattcagactcccactagaagaaacagaacttgaaaaaaggataattgtggatgacacctcaacccagtggtccaaaaacatgaaacatttgaccccgagcaccctcacacagatagactacaatgagaaggagaaaggggccattactcagtctcccttatcagattgccttacgaggagtcatagcatccctcaagcaaatagatctccattacccattgcaaaggtatcatcatttccatctattagacctatatatctgaccagggtcctattccaagacaactcttctcatcttccagcagcatcttatagaaagaaagattctggggtccaagaaagcagtcatttcttacaaggagccaaaaaaaataacctttctttagccattctaaccttggagatgactggtgatcaaagagaggttggctccctggggacaagtgccacaaattcagtcacatacaagaaagttgagaacactgttctcccgaaaccagacttgcccaaaacatctggcaaagttgaattgcttccaaaagttcacatttatcagaaggacctattccctacggaaactagcaatgggtctcctggccatctggatctcgtggaagggagccttcttcagggaacagagggagcgattaagtggaatgaagcaaacagacctggaaaagttccctttctgagagtagcaacagaaagctctgcaaagactccctccaagctattggatcctcttgcttgggataaccactatggtactcagataccaaaagaagagtggaaatcccaagagaagtcaccagaaaaaacagcttttaagaaaaaggataccattttgtccctgaacgcttgtgaaagcaatcatgcaatagcagcaataaatgagggacaaaataagcccgaaatagaagtcacctgggcaaagcaaggtaggactgaaaggctgtgctctcaaaacccaccagtcttgaaacgccatcaacgggaaataactcgtactactcttcagtcagatcaagaggaaattgactatgatgataccatatcagttgaaatgaagaaggaagattttgacatttatgatgaggatgaaaatcagagcccccgcagctttcaaaagaaaacacgacactattttattgctgcagtggagaggctctgggattatgggatgagtagctccccacatgttctaagaaacagggctcagagtggcagtgtccctcagttcaagaaagttgttttccaggaatttactgatggctcctttactcagcccttataccgtggagaactaaatgaacatttgggactcctggggccatatataagagcagaagttgaagataatatcatggtaactttcagaaatcaggcctctcgtccctattccttctattctagccttatttcttatgaggaagatcagaggcaaggagcagaacctagaaaaaactttgtcaagcctaatgaaaccaaaacttacttttggaaagtgcaacatcatatggcacccactaaagatgagtttgactgcaaagcctgggcttatttctctgatgttgacctggaaaaagatgtgcactcaggcctgattggaccccttctggtctgccacactaacacactgaaccctgctcatgggagacaagtgacagtacaggaatttgctctgtttttcaccatctttgatgagaccaaaagctggtacttcactgaaaatatggaaagaaactgcagggctccctgcaatatccagatggaagatcccacttttaaagagaattatcgcttccatgcaatcaatggctacataatggatacactacctggcttagtaatggctcaggatcaaaggattcgatggtatctgctcagcatgggcagcaatgaaaacatccattctattcatttcagtggacatgtgttcactgtacgaaaaaaagaggagtataaaatggcactgtacaatctctatccaggtgtttttgagacagtggaaatgttaccatccaaagctggaatttggcgggtggaatgccttattggcgagcatctacatgctgggatgagcacactttttctggtgtacagcaataagtgtcagactcccctgggaatggcttctggacacattagagattttcagattacagcttcaggacaatatggacagtgggccccaaagctggccagacttcattattccggatcaatcaatgcctggagcaccaaggagcccttttcttggatcaaggtggatctgttggcaccaatgattattcacggcatcaagacccagggtgcccgtcagaagttctccagcctctacatctctcagtttatcatcatgtatagtcttgatgggaagaagtggcagacttatcgaggaaattccactggaaccttaatggtcttctttggcaatgtggattcatctgggataaaacacaatatttttaaccctccaattattgctcgatacatccgtttgcacccaactcattatagcattcgcagcactcttcgcatggagttgatgggctgtgatttaaatagttgcagcatgccattgggaatggagagtaaagcaatatcagatgcacagattactgcttcatcctactttaccaatatgtttgccacctggtctccttcaaaagctcgacttcacctccaagggaggagtaatgcctggagacctcaggtgaataatccaaaagagtggctgcaagtggacttccagaagacaatgaaagtcacaggagtaactactcagggagtaaaatctctgcttaccagcatgtatgtgaaggagttcctcatctccagcagtcaagatggccatcagtggactctcttttttcagaatggcaaagtaaaggtttttcagggaaatcaagactccttcacacctgtggtgaactctctagacccaccgttactgactcgctaccttcgaattcacccccagagttgggtgcaccagattgccctgaggatggaggttctgggctgcgaggcacaggacctctactga

SEQ ID NO: 384 - DNA, 4425 bp, synthetic construct
  misc_feature 1..4425: note = Description of Artificial Sequence: Synthetic polynucleotide
  source 1..4425: mol_type = other DNA
atgcagattgagctgagcacctgcttcttcctgtgcctgctgaggttctgcttctctgccaccaggagatactacctgggggctgtggagctgagctgggactacatgcagtctgacctgggggagctgcctgtggatgccaggttcccccccagagtgcccaagagcttccccttcaacacctctgtggtgtacaagaagaccctgtttgtggagttcactgaccacctgttcaacattgccaagcccaggcccccctggatgggcctgctgggccccaccatccaggctgaggtgtatgacactgtggtgatcaccctgaagaacatggccagccaccctgtgagcctgcatgctgtgggggtgagctactggaaggcctctgagggggctgagtatgatgaccagaccagccagagggagaaggaggatgacaaggtgttccctgggggcagccacacctatgtgtggcaggtgctgaaggagaatggccccatggcctctgaccccctgtgcctgacctacagctacctgagccatgtggacctggtgaaggacctgaactctggcctgattggggccctgctggtgtgcagggagggcagcctggccaaggagaagacccagaccctgcacaagttcatcctgctgtttgctgtgtttgatgagggcaagagctggcactctgaaaccaagaacagcctgatgcaggacagggatgctgcctctgccagggcctggcccaagatgcacactgtgaatggctatgtgaacaggagcctgcctggcctgattggctgccacaggaagtctgtgtactggcatgtgattggcatgggcaccacccctgaggtgcacagcatcttcctggagggccacaccttcctggtcaggaaccacaggcaggccagcctggagatcagccccatcaccttcctgactgcccagaccctgctgatggacctgggccagttcctgctgttctgccacatcagcagccaccagcatgatggcatggaggcctatgtgaaggtggacagctgccctgaggagccccagctgaggatgaagaacaatgaggaggctgaggactatgatgatgacctgactgactctgagatggatgtggtgaggtttgatgatgacaacagccccagcttcatccagatcaggtctgtggccaagaagcaccccaagacctgggtgcactacattgctgctgaggaggaggactgggactatgcccccctggtgctggcccctgatgacaggagctacaagagccagtacctgaacaatggcccccagaggattggcaggaagtacaagaaggtcaggttcatggcctacactgatgaaaccttcaagaccagggaggccatccagcatgagtctggcatcctgggccccctgctgtatggggaggtgggggacaccctgctgatcatcttcaagaaccaggccagcaggccctacaacatctacccccatggcatcactgatgtgaggcccctgtacagcaggaggctgcccaagggggtgaagcacctgaaggacttccccatcctgcctggggagatcttcaagtacaagtggactgtgactgtggaggatggccccaccaagtctgaccccaggtgcctgaccagatactacagcagctttgtgaacatggagagggacctggcctctggcctgattggccccctgctgatctgctacaaggagtctgtggaccagaggggcaaccagatcatgtctgacaagaggaatgtgatcctgttctctgtgtttgatgagaacaggagctggtacctgactgagaacatccagaggttcctgcccaaccctgctggggtgcagctggaggaccctgagttccaggccagcaacatcatgcacagcatcaatggctatgtgtttgacagcctgcagctgtctgtgtgcctgcatgaggtggcctactggtacatcctgagcattggggcccagactgacttcctgtctgtgttcttctctggctacaccttcaagcacaagatggtgtatgaggacaccctgaccctgttccccttctctggggagactgtgttcatgagcatggagaaccctggcctgtggattctgggctgccacaactctgacttcaggaacaggggcatgactgccctgctgaaagtctccagctgtgacaagaacactggggactactatgaggacagctatgaggacatctctgcctacctgctgagcaagaacaatgccattgagcccaggagcttcagccagaatgccactaatgtgtctaacaacagcaacaccagcaatgacagcaatgtgtctcccccagtgctgaagaggcaccagagggagatcaccaggaccaccctgcagtctgaccaggaggagattgactatgatgacaccatctctgtggagatgaagaaggaggactttgacatctacgacgaggacgagaaccagagccccaggagcttccagaagaagaccaggcactacttcattgctgctgtggagaggctgtgggactatggcatgagcagcagcccccatgtgctgaggaacagggcccagtctggctctgtgccccagttcaagaaggtggtgttccaggagttcactgatggcagcttcacccagcccctgtacagaggggagctgaatgagcacctgggcctgctgggcccctacatcagggctgaggtggaggacaacatcatggtgaccttcaggaaccaggccagcaggccctacagcttctacagcagcctgatcagctatgaggaggaccagaggcagggggctgagcccaggaagaactttgtgaagcccaatgaaaccaagacctacttctggaaggtgcagcaccacatggcccccaccaaggatgagtttgactgcaaggcctgggcctacttctctgatgtggacctggagaaggatgtgcactctggcctgattggccccctgctggtgtgccacaccaacaccctgaaccctgcccatggcaggcaggtgactgtgcaggagtttgccctgttcttcaccatctttgatgaaaccaagagctggtacttcactgagaacatggagaggaactgcagggccccctgcaacatccagatggaggaccccaccttcaaggagaactacaggttccatgccatcaatggctacatcatggacaccctgcctggcctggtgatggcccaggaccagaggatcaggtggtacctgctgagcatgggcagcaatgagaacatccacagcatccacttctctggccatgtgttcactgtgaggaagaaggaggagtacaagatggccctgtacaacctgtaccctggggtgtttgagactgtggagatgctgcccagcaaggctggcatctggagggtggagtgcctgattggggagcacctgcatgctggcatgagcaccctgttcctggtgtacagcaacaagtgccagacccccctgggcatggcctctggccacatcagggacttccagatcactgcctctggccagtatggccagtgggcccccaagctggccaggctgcactactctggcagcatcaatgcctggagcaccaaggagcccttcagctggatcaaggtggacctgctggcccccatgatcatccatggcatcaagacccagggggccaggcagaagttcagcagcctgtacatcagccagttcatcatcatgtacagcctggatggcaagaagtggcagacctacaggggcaacagcactggcaccctgatggtgttctttggcaatgtggacagctctggcatcaagcacaacatcttcaacccccccatcattgccagatacatcaggctgcaccccacccactacagcatcaggagcaccctgaggatggagctgatgggctgtgacctgaacagctgcagcatgcccctgggcatggagagcaaggccatctctgatgcccagatcactgccagcagctacttcaccaacatgtttgccacctggagccccagcaaggccaggctgcacctgcagggcaggagcaatgcctggaggccccaggtcaacaaccccaaggagtggctgcaggtggacttccagaagaccatgaaggtgactggggtgaccacccagggggtgaagagcctgctgaccagcatgtatgtgaaggagttcctgatcagcagcagccaggatggccaccagtggaccctgttcttccagaatggcaaggtgaaggtgttccagggcaaccaggacagcttcacccctgtggtgaacagcctggacccccccctgctgaccagatacctgaggattcacccccagagctgggtgcaccagattgccctgaggatggaggtgctgggctgtgaggcccaggacctgtactga

SEQ ID NO: 385 - protein, 1474 aa, synthetic construct [sequence omitted]

SEQ ID NO: 386 - DNA, 5052 bp, synthetic construct
  misc_feature 1..5052: note = Description of Artificial Sequence: Synthetic polynucleotide
  source 1..5052: mol_type = other DNA
atgcaaatagagctctccacctgcttctttctgtgccttttgcgattctgctttagtgccaccagaagatactacctgggtgcagtggaactgtcatgggactatatgcaaagtgatctcggtgagctgcctgtggacgcaagatttcctcctagagtgccaaaatcttttccattcaacacctcagtcgtgtacaaaaagactctgtttgtagaattcacggatcaccttttcaacatcgctaagccaaggccaccctggatgggtctgctaggtcctaccatccaggctgaggtttatgatacagtggtcattacacttaagaacatggcttcccatcctgtcagtcttcatgctgttggtgtatcctactggaaagcttctgagggagctgaatatgatgatcagaccagtcaaagggagaaagaagatgataaagtcttccctggtggaagccatacatatgtctggcaggtcctgaaagagaatggtccaatggcctctgacccactgtgccttacctactcatatctttctcatgtggacctggtaaaagacttgaattcaggcctcattggagccctactagtatgtagagaagggagtctggccaaggaaaagacacagaccttgcacaaatttatactactttttgctgtatttgatgaagggaaaagttggcactcagaaacaaagaactccttgatgcaggatagggatgctgcatctgctcgggcctggcctaaaatgcacacagtcaatggttatgtaaacaggtctctgccaggtctgattggatgccacaggaaatcagtctattggcatgtgattggaatgggcaccactcctgaagtgcactcaatattcctcgaaggtcacacatttcttgtgaggaaccatcgccaggcgtccttggaaatctcgccaataactttccttactgctcaaacactcttgatggaccttggacagtttctactgttttgtcatatctcttcccaccaacatgatggcatggaagcttatgtcaaagtagacagctgtccagaggaaccccaactacgaatgaaaaataatgaagaagcggaagactatgatgatgatcttactgattctgaaatggatgtggtcaggtttgatgatgacaactctccttcctttatccaaattcgctcagttgccaagaagcatcctaaaacttgggtacattacattgctgctgaagaggaggactgggactatgctcccttagtcctcgcccccgatgacagaagttataaaagtcaatatttgaacaatggccctcagcggattggtaggaagtacaaaaaagtccgatttatggcatacacagatgaaacctttaagactcgtgaagctattcagcatgaatcaggaatcttgggacctttactttatggggaagttggagacacactgttgattatatttaagaatcaagcaagcagaccatataacatctaccctcacggaatcactgatgtccgtcctttgtattcaaggagattaccaaaaggtgtaaaacatttgaaggattttccaattctgccaggagaaatattcaaatataaatggacagtgactgtagaagatgggccaactaaatcagatcctcggtgcctgacccgctattactctagtttcgttaatatggagagagatctagcttcaggactcattggccctctcctcatctgctacaaagaatctgtagatcaaagaggaaaccagataatgtcagacaagaggaatgtcatcctgttttctgtatttgatgagaaccgaagctggtacctcacagagaatatacaacgctttctccccaatccagctggagtgcagcttgaggatccagagttccaagcctccaacatcatgcacagcatcaatggctatgtttttgatagtttgcagttgtcagtttgtttgcatgaggtggcatactggtacattctaagcattggagcacagactgacttcctttctgtcttcttctctggatataccttcaaacacaaaatggtctatgaagacacactcaccctattcccattctcaggagaaactgtcttcatgtcgatggaaaacccaggtctatggattctggggtgccacaactcagactttcggaacagaggcatgaccgccttactgaaggtttctagttgtgacaagaacactggtgattattacgaggacagttatgaagatatttcagcatacttgctgagtaaaaacaatgccattgaaccaagaagcttctctcaaaacccaccagtcttgaaacgccatcaacgggaaataactcgtactactcttcagtcagatcaagaggaaattgactatgatgataccatatcagttgaaatgaagaaggaagattttgacatttatgatgaggatgaaaatcagagcccccgcagctttcaaaagaaaacacgacactattttattgctgcagtggagaggctctgggattatgggatgagtagctccccacatgttctaagaaacagggctcagagtggcagtgtccctcagttcaagaaagttgttttccaggaatttactgatggctcctttactcagcccttataccgtggagaactaaatgaacatttgggactcctggggccatatataagagcagaagttgaagataatatcatggtaactttcagaaatcaggcctctcgtccctattccttctattctagccttatttcttatgaggaagatcagaggcaaggagcagaacctagaaaaaactttgtcaagcctaatgaaaccaaaacttacttttggaaagtgcaacatcatatggcacccactaaagatgagtttgactgcaaagcctgggcttatttctctgatgttgacctggaaaaagatgtgcactcaggcctgattggaccccttctggtctgccacactaacacactgaaccctgctcatgggagacaagtgacagtacaggaatttgctctgtttttcaccatctttgatgagaccaaaagctggtacttcactgaaaatatggaaagaaactgcagggctccctgcaatatccagatggaagatcccacttttaaagagaattatcgcttccatgcaatcaatggctacataatggatacactacctggcttagtaatggctcaggatcaaaggattcgatggtatctgctcagcatgggcagcaatgaaaacatccattctattcatttcagtggacatgtgttcactgtacgaaaaaaagaggagtataaaatggcactgtacaatctctatccaggtgtttttgagacagtggaaatgttaccatccaaagctggaatttggcgggtggaatgccttattggcgagcatctacatgctgggatgagcacactttttctggtgtacagcaataagtgtcagactcccctgggaatggcttctggacacattagagattttcagattacagcttcaggacaatatggacagtgggccccaaagctggccagacttcattattccggatcaatcaatgcctggagcaccaaggagcccttttcttggatcaaggtggatctgttggcaccaatgattattcacggcatcaagacccagggtgcccgtcagaagttctccagcctctacatctctcagtttatcatcatgtatagtcttgatgggaagaagtggcagacttatcgaggaaattccactggaaccttaatggtcttctttggcaatgtggattcatctgggataaaacacaatatttttaaccctccaattattgctcgatacatccgtttgcacccaactcattatagcattcgcagcactcttcgcatggagttgatgggctgtgatttaaatagttgcagcatgccattgggaatggagagtaaagcaatatcagatgcacagattactgcttcatcctactttaccaatatgtttgccacctggtctccttcaaaagctcgacttcacctccaagggaggagtaatgcctggagacctcaggtgaataatccaaaagagtggctgcaagtggacttccagaagacaatgaaagtcacaggagtaactactcagggagtaaaatctctgcttaccagcatgtatgtgaaggagttcctcatctccagcagtcaagatggccatcagtggactctcttttttcagaatggcaaagtaaaggtttttcagggaaatcaagactccttcacacctgtggtgaactctctagacccaccgttactgactcgctaccttcgaattcacccccagagttgggtgcaccagattgccctgaggatggaggttctgggctgcgaggcacaggacctctacgacaaaactcacacatgcccaccgtgcccagctccagaactcctgggcggaccgtcagtcttcctcttccccccaaaacccaaggacaccctcatgatctcccggacccctgaggtcacatgcgtggtggtggacgtgagccacgaagaccctgaggtcaagttcaactggtacgtggacggcgtggaggtgcataatgccaagacaaagccgcgggaggagcagtacaacagcacgtaccgtgtggtcagcgtcctcaccgtcctgcaccaggactggctgaatggcaaggagtacaagtgcaaggtctccaacaaagccctcccagcccccatcgagaaaaccatctccaaagccaaagggcagccccgagaaccacaggtgtacaccctgcccccatcccgggatgagctgaccaagaaccaggtcagcctgacctgcctggtcaaaggcttctatcccagcgacatcgccgtggagtgggagagcaatgggcagccggagaacaactacaagaccacgcctcccgtgttggactccgacggctccttcttcctctacagcaagctcaccgtggacaagagcaggtggcagcaggggaacgtcttctcatgctccgtgatgcatgaggctctgcacaaccactacacgcagaagagcctctccctgtctccgggtaaa

SEQ ID NO: 387 - DNA, 4374 bp, synthetic construct
  misc_feature 1..4374: note = Description of Artificial Sequence: Synthetic polynucleotide
  source 1..4374: mol_type = other DNA
atgcagatcgagctgtctacctgcttcttcctgtgcctgctgcggttctgcttcagcgccaccagaagatattacctgggcgccgtggaactgagctgggactacatgcagtctgacctgggagagctgcccgtggacgctagatttcctccaagagtgcccaagagcttccccttcaacacctccgtggtgtacaagaaaaccctgttcgtggaattcaccgaccacctgttcaatatcgccaagcctcggcctccttggatgggactgctgggacctacaattcaggccgaggtgtacgacaccgtggtcatcaccctgaagaacatggccagccatcctgtgtctctgcacgccgtgggagtgtcttattggaaggcttctgagggcgccgagtacgacgatcagacaagccagagagagaaagaggacgacaaggttttccctggcggcagccacacctatgtctggcaggtcctgaaagaaaacggccctatggcctccgatcctctgtgcctgacatacagctacctgagccacgtggacctggtcaaggacctgaattctggcctgatcggagccctgctcgtgtgtagagaaggcagcctggccaaagagaaaacccagacactgcacaagttcatcctgctgttcgccgtgttcgacgagggcaagagctggcacagcgagacaaagaacagcctgatgcaggacagggatgccgcctctgctagagcttggcctaagatgcacaccgtgaacggctacgtgaacagaagcctgcctggactgatcggctgccacagaaagtccgtgtactggcacgtgatcggcatgggcacaacacctgaggtgcacagcatctttctggaaggccacaccttcctcgtgcggaaccacagacaggccagcctggaaatcagccctatcaccttcctgaccgctcagaccctgctgatggatctgggccagtttctgctgttctgccacatcagctcccaccagcacgatggcatggaagcctacgtgaaggtggacagctgccccgaagaaccccagctgcggatgaagaacaacgaggaagccgaggactacgacgacgacctgaccgactctgagatggacgtcgtcagattcgacgacgataacagccccagcttcatccagatcagaagcgtggccaagaagcaccccaagacctgggtgcactatatcgccgccgaggaagaggactgggattacgctcctctggtgctggcccctgacgacagaagctacaagagccagtacctgaacaacggccctcagcggatcggccggaagtataagaaagtgcggttcatggcctacaccgacgagacattcaagaccagagaggccatccagcacgagagcggaattctgggccctctgctgtatggcgaagtgggcgatacactgctgatcatcttcaagaaccaggccagcagaccctacaacatctaccctcacggcatcaccgatgtgcggcccctgtattctagaaggctgcccaagggcgtgaagcacctgaaggacttccctatcctgcctggcgagattttcaagtacaagtggaccgtgaccgtggaagatggccccaccaagagcgaccctagatgtctgacacggtactacagcagcttcgtgaacatggaacgcgacctggccagcggcctgattggacctctgctgatctgctacaaagaaagcgtggaccagcggggcaaccagatcatgagcgacaagcggaacgtgatcctgtttagcgtgttcgatgagaaccggtcctggtatctgaccgagaacatccagcggtttctgcccaatcctgccggggtgcaactggaagatcctgagttccaggcaagcaacatcatgcactccatcaatggctatgtgttcgacagcctgcagctgagcgtgtgcctgcacgaagtggcctactggtacatcctgagcattggcgcccagaccgacttcctgtccgtgttctttagcggctacaccttcaagcacaagatggtgtacgaggataccctgacactgttcccattcagcggcgagacagtgttcatgagcatggaaaaccccggcctgtggattctgggctgtcacaacagcgacttccggaacagaggcatgacagccctgctgaaggtgtccagctgcgacaagaacaccggcgactactacgaggacagctatgaggacatcagcgcctacctgctgagcaagaacaatgccatcgagcctcggagcttcagccagaatcctcctgtgctgaagcggcaccagcgcgagatcaccagaacaaccctgcagagcgaccaagaggaaatcgattacgacgacaccatcagcgtcgagatgaagaaagaagatttcgacatctacgacgaggacgagaatcagagccccagaagctttcagaaaaagacccggcactacttcattgccgccgtcgagagactgtgggactacggcatgtctagcagccctcacgtgctgagaaatagagcccagagcggcagcgtgccccagttcaagaaagtggtgttccaagagttcaccgacggcagcttcacccagccactgtatagaggcgagctgaacgagcatctgggcctgctgggcccttatatcagagccgaagtggaagataacatcatggtcaccttccggaatcaggctagccggccttacagcttctacagctccctgatcagctacgaagaggaccagagacagggcgctgagcccagaaagaacttcgtgaagcccaacgagactaagacctacttttggaaggtgcagcaccacatggcccctacaaaggacgagttcgactgcaaagcctgggcctacttctccgatgtggatctggaaaaggacgtgcacagcgggctcatcggaccactgcttgtgtgccacaccaacacactgaaccccgctcacggcagacaagtgacagtgcaagagttcgccctgttcttcaccatcttcgacgaaacaaagagctggtacttcaccgagaatatggaacggaactgcagagccccttgcaacatccagatggaagatcccaccttcaaagagaactaccggttccacgccatcaacggctacatcatggacacactgcccggcctggttatggcccaggatcagagaatccggtggtatctgctgtccatgggctccaacgagaatatccacagcatccacttcagcggccacgtgttcaccgtgcggaaaaaagaagagtacaaaatggccctgtacaatctgtaccctggggtgttcgaaaccgtggaaatgctgccttccaaggccggcatttggagagtggaatgtctgattggagagcacctccacgccggaatgagcaccctgtttctggtgtacagcaacaagtgtcagacccctctcggcatggcctctggacacatcagagacttccagatcaccgcctctggccagtacggacagtgggctcctaaactggctcggctgcactacagcggcagcatcaatgcctggtccaccaaagagcccttcagctggatcaaggtggacctgctggctcccatgatcatccacggaatcaagacccagggcgccagacagaagttcagcagcctgtacatcagccagttcatcatcatgtacagcctggacggcaagaagtggcagacctacagaggcaacagcaccggcacactcatggtgttcttcggcaacgtggactccagcggcattaagcacaacatcttcaaccctccaatcattgcccggtacatccggctgcaccccacacactacagcatccggtctaccctgagaatggaactgatgggctgcgacctgaacagctgctctatgcccctcggaatggaaagcaaggccatcagcgacgcccagatcacagccagcagctacttcaccaacatgttcgccacttggagcccctccaaggctagactgcatctgcagggcagaagcaacgcttggaggccccaagtgaacaaccccaaagagtggctgcaggttgactttcaaaagaccatgaaagtgaccggcgtgaccacacagggcgtcaagtctctgctgacctctatgtacgtgaaagagttcctgatctccagcagccaggacggccatcagtggaccctgtttttccagaacggcaaagtgaaagtgttccagggcaatcaggacagcttcacacccgtggtcaattctctggaccctccactgctgaccagatacctgcggattcaccctcagtcttgggtgcaccagatcgctctgcggatggaagtgctgggctgtgaagctcaggacctctactag

SEQ ID NO: 388 - DNA, 4980 bp, synthetic construct
  misc_feature 1..4980: note = Description of Artificial Sequence: Synthetic polynucleotide
  source 1..4980: mol_type = other DNA
atgcagatcgagctgagcacctgcttcttcctgtgcctgctgcgcttctgcttcagcgccacccgccgctactacctgggcgccgtggagctgagctgggactacatgcagagcgacctgggcgagctgcccgtggacgcccgcttccccccccgcgtgcccaagagcttccccttcaacaccagcgtggtgtacaagaagaccctgttcgtggagttcaccgaccacctgttcaacatcgccaagccccgccccccctggatgggcctgctgggccccaccatccaggccgaggtgtacgacaccgtggtgatcaccctgaagaacatggccagccaccccgtgagcctgcacgccgtgggcgtgagctactggaaggccagcgagggcgccgagtacgacgaccagaccagccagcgcgagaaggaggacgacaaggtgttccccggcggcagccacacctacgtgtggcaggtgctgaaggagaacggccccatggccagcgaccccctgtgcctgacctacagctacctgagccacgtggacctggtgaaggacctgaacagcggcctgatcggcgccctgctggtgtgccgcgagggcagcctggccaaggagaagacccagaccctgcacaagttcatcctgctgttcgccgtgttcgacgagggcaagagctggcacagcgagaccaagaacagcctgatgcaggaccgcgacgccgccagcgcccgcgcctggcccaagatgcacaccgtgaacggctacgtgaaccgcagcctgcccggcctgatcggctgccaccgcaagagcgtgtactggcacgtgatcggcatgggcaccacccccgaggtgcacagcatcttcctggagggccacaccttcctggtgcgcaaccaccgccaggccagcctggagatcagccccatcaccttcctgaccgcccagaccctgctgatggacctgggccagttcctgctgttctgccacatcagcagccaccagcacgacggcatggaggcctacgtgaaggtggacagctgccccgaggagccccagctgcgcatgaagaacaacgaggaggccgaggactacgacgacgacctgaccgacagcgagatggacgtggtgcgcttcgacgacgacaacagccccagcttcatccagatccgcagcgtggccaagaagcaccccaagacctgggtgcactacatcgccgccgaggaggaggactgggactacgcccccctggtgctggcccccgacgaccgcagctacaagagccagtacctgaacaacggcccccagcgcatcggccgcaagtacaagaaggtgcgcttcatggcctacaccgacgagaccttcaagacccgcgaggccatccagcacgagagcggcatcctgggccccctgctgtacggcgaggtgggcgacaccctgctgatcatcttcaagaaccaggccagccgcccctacaacatctacccccacggcatcaccgacgtgcgccccctgtacagccgccgcctgcccaagggcgtgaagcacctgaaggacttccccatcctgcccggcgagatcttcaagtacaagtggaccgtgaccgtggaggacggccccaccaagagcgacccccgctgcctgacccgctactacagcagcttcgtgaacatggagcgcgacctggccagcggcctgatcggccccctgctgatctgctacaaggagagcgtggaccagcgcggcaaccagatcatgagcgacaagcgcaacgtgatcctgttcagcgtgttcgacgagaaccgcagctggtacctgaccgagaacatccagcgcttcctgcccaaccccgccggcgtgcagctggaggaccccgagttccaggccagcaacatcatgcacagcatcaacggctacgtgttcgacagcctgcagctgagcgtgtgcctgcacgaggtggcctactggtacatcctgagcatcggcgcccagaccgacttcctgagcgtgttcttcagcggctacaccttcaagcacaagatggtgtacgaggacaccctgaccctgttccccttcagcggcgagaccgtgttcatgagcatggagaaccccggcctgtggatcctgggctgccacaacagcgacttccgcaaccgcggcatgaccgccctgctgaaggtgagcagctgcgacaagaacaccggcgactactacgaggacagctacgaggacatcagcgcctacctgctgagcaagaacaacgccatcgagccccgcagcttcagccagaacagccgccaccccagcacccgccagaagcagttcaacgccaccaccatccccgagaacgacatcgagaagaccgacccctggttcgcccaccgcacccccatgcccaagatccagaacgtgagcagcagcgacctgctgatgctgctgcgccagagccccaccccccacggcctgagcctgagcgacctgcaagaggccaagtacgagaccttcagcgacgaccccagccccggcgccatcgacagcaacaacagcctgagcgagatgacccacttccgcccccagctgcaccacagcggcgacatggtgttcacccccgagagcggcctgcagctgcgcctgaacgagaagctgggcaccaccgccgccaccgagctgaagaagctggacttcaaggtgagcagcaccagcaacaacctgatcagcaccatccccagcgacaacctggccgccggcaccgacaacaccagcagcctgggcccccccagcatgcccgtgcactacgacagccagctggacaccaccctgttcggcaagaagagcagccccctgaccgagagcggcggccccctgagcctgagcgaggagaacaacgacagcaagctgccccccgtgctgaagcgccaccagcgcgagatcacccgcaccaccctgcagagcgaccaggaggagatcgactacgacgacaccatcagcgtggagatgaagaaggaggacttcgacatctacgacgaggacgagaaccagagcccccgcagcttccagaagaagacccgccactacttcatcgccgccgtggagcgcctgtgggactacggcatgagcagcagcccccacgtgctgcgcaaccgcgcccagagcggcagcgtgccccagttcaagaaggtggtgttccaggagttcaccgacggcagcttcacccagcccctgtaccgcggcgagctgaacgagcacctgggcctgctgggcccctacatccgcgccgaggtggaggacaacatcatggtgaccttccgcaaccaggccagccgcccctacagcttctacagcagcctgatcagctacgaggaggaccagcgccagggcgccgagccccgcaagaacttcgtgaagcccaacgagaccaagacctacttctggaaggtgcagcaccacatggcccccaccaaggacgagttcgactgcaaggcctgggcctacttcagcgacgtggacctggagaaggacgtgcacagcggcctgatcggccccctgctggtgtgccacaccaacaccctgaaccccgcccacggccgccaggtgaccgtgcaggagttcgccctgttcttcaccatcttcgacgagaccaagagctggtacttcaccgagaacatggagcgcaactgccgcgccccctgcaacatccagatggaggaccccaccttcaaggagaactaccgcttccacgccatcaacggctacatcatggacaccctgcccggcctggtgatggcccaggaccagcgcatccgctggtacctgctgagcatgggcagcaacgagaacatccacagcatccacttcagcggccacgtgttcaccgtgcgcaagaaggaggagtacaagatggccctgtacaacctgtaccccggcgtgttcgagaccgtggagatgctgcccagcaaggccggcatctggcgcgtggagtgcctgatcggcgagcacctgcacgccggcatgagcaccctgttcctggtgtacagcaacaagtgccagacccccctgggcatggccagcggccacatccgcgacttccagatcaccgccagcggccagtacggccagtgggcccccaagctggcccgcctgcactacagcggcagcatcaacgcctggagcaccaaggagcccttcagctggatcaaggtggacctgctggcccccatgatcatccacggcatcaagacccagggcgcccgccagaagttcagcagcctgtacatcagccagttcatcatcatgtacagcctggacggcaagaagtggcagacctaccgcggcaacagcaccggcaccctgatggtgttcttcggcaacgtggacagcagcggcatcaagcacaacatcttcaacccccccatcatcgcccgctacatccgcctgcaccccacccactacagcatccgcagcaccctgcgcatggagctgatgggctgcgacctgaacagctgcagcatgcccctgggcatggagagcaaggccatcagcgacgcccagatcaccgccagcagctacttcaccaacatgttcgccacctggagccccagcaaggcccgcctgcacctgcaaggccgcagcaacgcctggcgcccccaggtgaacaaccccaaggagtggctgcaggtggacttccagaagaccatgaaggtgaccggcgtgaccacccagggcgtgaagagcctgctgaccagcatgtacgtgaaggagttcctgatcagcagcagccaggacggccaccagtggaccctgttcttccagaacggcaaggtgaaggtgttccagggcaaccaggacagcttcacccccgtggtgaacagcctggacccccccctgctgacccgctacctgcgcatccacccccagagctgggtgcaccagatcgccctgcgcatggaggtgctgggctgcgaggcccaggacctgtactaa

SEQ ID NO: 389 - DNA, 7056 bp, synthetic construct
  misc_feature 1..7056: note = Description of Artificial Sequence: Synthetic polynucleotide
  source 1..7056: mol_type = other DNA
atgcagatcgagctgagcacctgcttcttcctgtgcctgctgcgcttctgcttcagcgccacccgccgctactacctgggcgccgtggagctgagctgggactacatgcagagcgacctgggcgagctgcccgtggacgcccgcttccccccccgcgtgcccaagagcttccccttcaacaccagcgtggtgtacaagaagaccctgttcgtggagttcaccgaccacctgttcaacatcgccaagccccgccccccctggatgggcctgctgggccccaccatccaggccgaggtgtacgacaccgtggtgatcaccctgaagaacatggccagccaccccgtgagcctgcacgccgtgggcgtgagctactggaaggccagcgagggcgccgagtacgacgaccagaccagccagcgcgagaaggaggacgacaaggtgttccccggcggcagccacacctacgtgtggcaggtgctgaaggagaacggccccatggccagcgaccccctgtgcctgacctacagctacctgagccacgtggacctggtgaaggacctgaacagcggcctgatcggcgccctgctggtgtgccgcgagggcagcctggccaaggagaagacccagaccctgcacaagttcatcctgctgttcgccgtgttcgacgagggcaagagctggcacagcgagaccaagaacagcctgatgcaggaccgcgacgccgccagcgcccgcgcctggcccaagatgcacaccgtgaacggctacgtgaaccgcagcctgcccggcctgatcggctgccaccgcaagagcgtgtactggcacgtgatcggcatgggcaccacccccgaggtgcacagcatcttcctggagggccacaccttcctggtgcgcaaccaccgccaggccagcctggagatcagccccatcaccttcctgaccgcccagaccctgctgatggacctgggccagttcctgctgttctgccacatcagcagccaccagcacgacggcatggaggcctacgtgaaggtggacagctgccccgaggagccccagctgcgcatgaagaacaacgaggaggccgaggactacgacgacgacctgaccgacagcgagatggacgtggtgcgcttcgacgacgacaacagccccagcttcatccagatccgcagcgtggccaagaagcaccccaagacctgggtgcactacatcgccgccgaggaggaggactgggactacgcccccctggtgctggcccccgacgaccgcagctacaagagccagtacctgaacaacggcccccagcgcatcggccgcaagtacaagaaggtgcgcttcatggcctacaccgacgagaccttcaagacccgcgaggccatccagcacgagagcggcatcctgggccccctgctgtacggcgaggtgggcgacaccctgctgatcatcttcaagaaccaggccagccgcccctacaacatctacccccacggcatcaccgacgtgcgccccctgtacagccgccgcctgcccaagggcgtgaagcacctgaaggacttccccatcctgcccggcgagatcttcaagtacaagtggaccgtgaccgtggaggacggccccaccaagagcgacccccgctgcctgacccgctactacagcagcttcgtgaacatggagcgcgacctggccagcggcctgatcggccccctgctgatctgctacaaggagagcgtggaccagcgcggcaaccagatcatgagcgacaagcgcaacgtgatcctgttcagcgtgttcgacgagaaccgcagctggtacctgaccgagaacatccagcgcttcctgcccaaccccgccggcgtgcagctggaggaccccgagttccaggccagcaacatcatgcacagcatcaacggctacgtgttcgacagcctgcagctgagcgtgtgcctgcacgaggtggcctactggtacatcctgagcatcggcgcccagaccgacttcctgagcgtgttcttcagcggctacaccttcaagcacaagatggtgtacgaggacaccctgaccctgttccccttcagcggcgagaccgtgttcatgagcatggagaaccccggcctgtggatcctgggctgccacaacagcgacttccgcaaccgcggcatgaccgccctgctgaaggtgagcagctgcgacaagaacaccggcgactactacgaggacagctacgaggacatcagcgcctacctgctgagcaagaacaacgccatcgagccccgcagcttcagccagaacagccgccaccccagcacccgccagaagcagttcaacgccaccaccatccccgagaacgacatcgagaagaccgacccctggttcgcccaccgcacccccatgcccaagatccagaacgtgagcagcagcgacctgctgatgctgctgcgccagagccccaccccccacggcctgagcctgagcgacctgcaagaggccaagtacgagaccttcagcgacgaccccagccccggcgccatcgacagcaacaacagcctgagcgagatgacccacttccgcccccagctgcaccacagcggcgacatggtgttcacccccgagagcggcctgcagctgcgcctgaacgagaagctgggcaccaccgccgccaccgagctgaagaagctggacttcaaggtgagcagcaccagcaacaacctgatcagcaccatccccagcgacaacctggccgccggcaccgacaacaccagcagcctgggcccccccagcatgcccgtgcactacgacagccagctggacaccaccctgttcggcaagaagagcagccccctgaccgagagcggcggccccctgagcctgagcgaggagaacaacgacagcaagctgctggagagcggcctgatgaacagccaggagagcagctggggcaagaacgtgagcagcaccgagagcggcaggctgttcaagggcaagcgcgcccacggccccgccctgctgaccaaggacaacgccctgttcaaggtgagcatcagcctgctgaagaccaacaagaccagcaacaacagcgccaccaaccgcaagacccacatcgacggccccagcctgctgatcgagaacagccccagcgtgtggcagaacatcctggagagcgacaccgagttcaagaaggtgacccccctgatccacgaccgcatgctgatggacaagaacgccaccgccctgcgcctgaaccacatgagcaacaagaccaccagcagcaagaacatggagatggtgcagcagaagaaggagggccccatcccccccgacgcccagaaccccgacatgagcttcttcaagatgctgttcctgcccgagagcgcccgctggatccagcgcacccacggcaagaacagcctgaacagcggccagggccccagccccaagcagctggtgagcctgggccccgagaagagcgtggagggccagaacttcctgagcgagaagaacaaggtggtggtgggcaagggcgagttcaccaaggacgtgggcctgaaggagatggtgttccccagcagccgcaacctgttcctgaccaacctggacaacctgcacgagaacaacacccacaaccaggagaagaagatccaggaggagatcgagaagaaggagaccctgatccaggagaacgtggtgctgccccagatccacaccgtgaccggcaccaagaacttcatgaagaacctgttcctgctgagcacccgccagaacgtggagggcagctacgacggcgcctacgcccccgtgctgcaggacttccgcagcctgaacgacagcaccaaccgcaccaagaagcacaccgcccacttcagcaagaagggcgaggaggagaacctggagggcctgggcaaccagaccaagcagatcgtggagaagtacgcctgcaccacccgcatcagccccaacaccagccagcagaacttcgtgacccagcgcagcaagcgcgccctgaagcagttccgcctgcccctggaggagaccgagctggagaagcgcatcatcgtggacgacaccagcacccagtggagcaagaacatgaagcacctgacccccagcaccctgacccagatcgactacaacgagaaggagaagggcgccatcacccagagccccctgagcgactgcctgacccgcagccacagcatcccccaggccaaccgcagccccctgcccatcgccaaggtgagcagcttccccagcatccgccccatctacctgacccgcgtgctgttccaggacaacagcagccacctgcccgccgccagctaccgcaagaaggacagcggcgtgcaggagagcagccacttcctgcaaggcgccaagaagaacaacctgagcctggccatcctgaccctggagatgaccggcgaccagcgcgaggtgggcagcctgggcaccagcgccaccaacagcgtgacctacaagaaggtggagaacaccgtgctgcccaagcccgacctgcccaagaccagcggcaaggtggagctgctgcccaaggtgcacatctaccagaaggacctgttccccaccgagaccagcaacggcagccccggccacctggacctggtggagggcagcctgctgcagggcaccgagggcgccatcaagtggaacgaggccaaccgccccggcaaggtgcccttcctgcgcgtggccaccgagagcagcgccaagacccccagcaagctgctggaccccctggcctgggacaaccactacggcacccagatccccaaggaggagtggaagagccaggagaagagccccgagaagaccgccttcaagaagaaggacaccatcctgagcctgaacgcctgcgagagcaaccacgccatcgccgccatcaacgagggccagaacaagcccgagatcgaggtgacctgggccaagcagggccgcaccgagcgcctgtgcagccagaacccccccgtgctgaagcgccaccagcgcgagatcacccgcaccaccctgcagagcgaccaggaggagatcgactacgacgacaccatcagcgtggagatgaagaaggaggacttcgacatctacgacgaggacgagaaccagagcccccgcagcttccagaagaagacccgccactacttcatcgccgccgtggagcgcctgtgggactacggcatgagcagcagcccccacgtgctgcgcaaccgcgcccagagcggcagcgtgccccagttcaagaaggtggtgttccaggagttcaccgacggcagcttcacccagcccctgtaccgcggcgagctgaacgagcacctgggcctgctgggcccctacatccgcgccgaggtggaggacaacatcatggtgaccttccgcaaccaggccagccgcccctacagcttctacagcagcctgatcagctacgaggaggaccagcgccagggcgccgagccccgcaagaacttcgtgaagcccaacgagaccaagacctacttctggaaggtgcagcaccacatggcccccaccaaggacgagttcgactgcaaggcctgggcctacttcagcgacgtggacctggagaaggacgtgcacagcggcctgatcggccccctgctggtgtgccacaccaacaccctgaaccccgcccacggccgccaggtgaccgtgcaggagttcgccctgttcttcaccatcttcgacgagaccaagagctggtacttcaccgagaacatggagcgcaactgccgcgccccctgcaacatccagatggaggaccccaccttcaaggagaactaccgcttccacgccatcaacggctacatcatggacaccctgcccggcctggtgatggcccaggaccagcgcatccgctggtacctgctgagcatgggcagcaacgagaacatccacagcatccacttcagcggccacgtgttcaccgtgcgcaagaaggaggagtacaagatggccctgtacaacctgtaccccggcgtgttcgagaccgtggagatgctgcccagcaaggccggcatctggcgcgtggagtgcctgatcggcgagcacctgcacgccggcatgagcaccctgttcctggtgtacagcaacaagtgccagacccccctgggcatggccagcggccacatccgcgacttccagatcaccgccagcggccagtacggccagtgggcccccaagctggcccgcctgcactacagcggcagcatcaacgcctggagcaccaaggagcccttcagctggatcaaggtggacctgctggcccccatgatcatccacggcatcaagacccagggcgcccgccagaagttcagcagcctgtacatcagccagttcatcatcatgtacagcctggacggcaagaagtggcagacctaccgcggcaacagcaccggcaccctgatggtgttcttcggcaacgtggacagcagcggcatcaagcacaacatcttcaacccccccatcatcgcccgctacatccgcctgcaccccacccactacagcatccgcagcaccctgcgcatggagctgatgggctgcgacctgaacagctgcagcatgcccctgggcatggagagcaaggccatcagcgacgcccagatcaccgccagcagctacttcaccaacatgttcgccacctggagccccagcaaggcccgcctgcacctgcaaggccgcagcaacgcctggcgcccccaggtgaacaaccccaaggagtggctgcaggtggacttccagaagaccatgaaggtgaccggcgtgaccacccagggcgtgaagagcctgctgaccagcatgtacgtgaaggagttcctgatcagcagcagccaggacggccaccagtggaccctgttcttccagaacggcaaggtgaaggtgttccagggcaaccaggacagcttcacccccgtggtgaacagcctggacccccccctgctgacccgctacctgcgcatccacccccagagctgggtgcaccagatcgccctgcgcatggaggtgctgggctgcgaggcccaggacctgtactaa

SEQ ID NO: 390 - DNA, 4374 bp, synthetic construct
  misc_feature 1..4374: note = Description of Artificial Sequence: Synthetic polynucleotide
  source 1..4374: mol_type = other DNA
atgcagatcgagctgagcacctgcttcttcctgtgcctgctgcgcttctgcttcagcgccacccgccgctactacctgggcgccgtggagctgagctgggactacatgcagagcgacctgggcgagctgcccgtggacgcccgcttccccccccgcgtgcccaagagcttccccttcaacaccagcgtggtgtacaagaagaccctgttcgtggagttcaccgaccacctgttcaacatcgccaagccccgccccccctggatgggcctgctgggccccaccatccaggccgaggtgtacgacaccgtggtgatcaccctgaagaacatggccagccaccccgtgagcctgcacgccgtgggcgtgagctactggaaggccagcgagggcgccgagtacgacgaccagaccagccagcgcgagaaggaggacgacaaggtgttccccggcggcagccacacctacgtgtggcaggtgctgaaggagaacggccccatggccagcgaccccctgtgcctgacctacagctacctgagccacgtggacctggtgaaggacctgaacagcggcctgatcggcgccctgctggtgtgccgcgagggcagcctggccaaggagaagacccagaccctgcacaagttcatcctgctgttcgccgtgttcgacgagggcaagagctggcacagcgagaccaagaacagcctgatgcaggaccgcgacgccgccagcgcccgcgcctggcccaagatgcacaccgtgaacggctacgtgaaccgcagcctgcccggcctgatcggctgccaccgcaagagcgtgtactggcacgtgatcggcatgggcaccacccccgaggtgcacagcatcttcctggagggccacaccttcctggtgcgcaaccaccgccaggccagcctggagatcagccccatcaccttcctgaccgcccagaccctgctgatggacctgggccagttcctgctgttctgccacatcagcagccaccagcacgacggcatggaggcctacgtgaaggtggacagctgccccgaggagccccagctgcgcatgaagaacaacgaggaggccgaggactacgacgacgacctgaccgacagcgagatggacgtggtgcgcttcgacgacgacaacagccccagcttcatccagatccgcagcgtggccaagaagcaccccaagacctgggtgcactacatcgccgccgaggaggaggactgggactacgcccccctggtgctggcccccgacgaccgcagctacaagagccagtacctgaacaacggcccccagcgcatcggccgcaagtacaagaaggtgcgcttcatggcctacaccgacgagaccttcaagacccgcgaggccatccagcacgagagcggcatcctgggccccctgctgtacggcgaggtgggcgacaccctgctgatcatcttcaagaaccaggccagccgcccctacaacatctacccccacggcatcaccgacgtgcgccccctgtacagccgccgcctgcccaagggcgtgaagcacctgaaggacttccccatcctgcccggcgagatcttcaagtacaagtggaccgtgaccgtggaggacggccccaccaagagcgacccccgctgcctgacccgctactacagcagcttcgtgaacatggagcgcgacctggccagcggcctgatcggccccctgctgatctgctacaaggagagcgtggaccagcgcggcaaccagatcatgagcgacaagcgcaacgtgatcctgttcagcgtgttcgacgagaaccgcagctggtacctgaccgagaacatccagcgcttcctgcccaaccccgccggcgtgcagctggaggaccccgagttccaggccagcaacatcatgcacagcatcaacggctacgtgttcgacagcctgcagctgagcgtgtgcctgcacgaggtggcctactggtacatcctgagcatcggcgcccagaccgacttcctgagcgtgttcttcagcggctacaccttcaagcacaagatggtgtacgaggacaccctgaccctgttccccttcagcggcgagaccgtgttcatgagcatggagaaccccggcctgtggatcctgggctgccacaacagcgacttccgcaaccgcggcatgaccgccctgctgaaggtgagcagctgcgacaagaacaccggcgactactacgaggacagctacgaggacatcagcgcctacctgctgagcaagaacaacgccatcgagccccgcagcttcagccagaacccccccgtgctgaagcgccaccagcgcgagatcacccgcaccaccctgcagagcgaccaggaggagatcgactacgacgacaccatcagcgtggagatgaagaaggaggacttcgacatctacgacgaggacgagaaccagagcccccgcagcttccagaagaagacccgccactacttcatcgccgccgtggagcgcctgtgggactacggcatgagcagcagcccccacgtgctgcgcaaccgcgcccagagcggcagcgtgccccagttcaagaaggtggtgttccaggagttcaccgacggcagcttcacccagcccctgtaccgcggcgagctgaacgagcacctgggcctgctgggcccctacatccgcgccgaggtggaggacaacatcatggtgaccttccgcaaccaggccagccgcccctacagcttctacagcagcctgatcagctacgaggaggaccagcgccagggcgccgagccccgcaagaacttcgtgaagcccaacgagaccaagacctacttctggaaggtgcagcaccacatggcccccaccaaggacgagttcgactgcaaggcctgggcctacttcagcgacgtggacctggagaaggacgtgcacagcggcctgatcggccccctgctggtgtgccacaccaacaccctgaaccccgcccacggccgccaggtgaccgtgcaggagttcgccctgttcttcaccatcttcgacgagaccaagagctggtacttcaccgagaacatggagcgcaactgccgcgccccctgcaacatccagatggaggaccccaccttcaaggagaactaccgcttccacgccatcaacggctacatcatggacaccctgcccggcctggtgatggcccaggaccagcgcatccgctggtacctgctgagcatgggcagcaacgagaacatccacagcatccacttcagcggccacgtgttcaccgtgcgcaagaaggaggagtacaagatggccctgtacaacctgtaccccggcgtgttcgagaccgtggagatgctgcccagcaaggccggcatctggcgcgtggagtgcctgatcggcgagcacctgcacgccggcatgagcaccctgttcctggtgtacagcaacaagtgccagacccccctgggcatggccagcggccacatccgcgacttccagatcaccgccagcggccagtacggccagtgggcccccaagctggcccgcctgcactacagcggcagcatcaacgcctggagcaccaaggagcccttcagctggatcaaggtggacctgctggcccccatgatcatccacggcatcaagacccagggcgcccgccagaagttcagcagcctgtacatcagccagttcatcatcatgtacagcctggacggcaagaagtggcagacctaccgcggcaacagcaccggcaccctgatggtgttcttcggcaacgtggacagcagcggcatcaagcacaacatcttcaacccccccatcatcgcccgctacatccgcctgcaccccacccactacagcatccgcagcaccctgcgcatggagctgatgggctgcgacctgaacagctgcagcatgcccctgggcatggagagcaaggccatcagcgacgcccagatcaccgccagcagctacttcaccaacatgttcgccacctggagccccagcaaggcccgcctgcacctgcaaggccgcagcaacgcctggcgcccccaggtgaacaaccccaaggagtggctgcaggtggacttccagaagaccatgaaggtgaccggcgtgaccacccagggcgtgaagagcctgctgaccagcatgtacgtgaaggagttcctgatcagcagcagccaggacggccaccagtggaccctgttcttccagaacggcaaggtgaaggtgttccagggcaaccaggacagcttcacccccgtggtgaacagcctggacccccccctgctgacccgctacctgcgcatccacccccagagctgggtgcaccagatcgccctgcgcatggaggtgctgggctgcgaggcccaggacctgtactaa

SEQ ID NO: 391 - DNA, 7056 bp, synthetic construct
  misc_feature 1..7056: note = Description of Artificial Sequence: Synthetic polynucleotide
  source 1..7056: mol_type = other DNA
atgcagatcgagctgtctacctgcttcttcctgtgcctgctgcggttctgcttcagcgccaccagaagatattacctgggcgccgtggaactgagctgggactacatgcagtctgacctgggagagctgcccgtggacgctagatttcctccaagagtgcccaagagcttccccttcaacacctccgtggtgtacaagaaaaccctgttcgtggaattcaccgaccacctgttcaatatcgccaagcctcggcctccttggatgggactgctgggacctacaattcaggccgaggtgtacgacaccgtggtcatcaccctgaagaacatggccagccatcctgtgtctctgcacgccgtgggagtgtcttattggaaggcttctgagggcgccgagtacgacgatcagacaagccagagagagaaagaggacgacaaggttttccctggcggcagccacacctatgtctggcaggtcctgaaagaaaacggccctatggcctccgatcctctgtgcctgacatacagctacctgagccacgtggacctggtcaaggacctgaattctggcctgatcggagccctgctcgtgtgtagagaaggcagcctggccaaagagaaaacccagacactgcacaagttcatcctgctgttcgccgtgttcgacgagggcaagagctggcacagcgagacaaagaacagcctgatgcaggacagggatgccgcctctgctagagcttggcctaagatgcacaccgtgaacggctacgtgaacagaagcctgcctggactgatcggctgccacagaaagtccgtgtactggcacgtgatcggcatgggcacaacacctgaggtgcacagcatctttctggaaggccacaccttcctcgtgcggaaccacagacaggccagcctggaaatcagccctatcaccttcctgaccgctcagaccctgctgatggatctgggccagtttctgctgttctgccacatcagctcccaccagcacgatggcatggaagcctacgtgaaggtggacagctgccccgaagaaccccagctgcggatgaagaacaacgaggaagccgaggactacgacgacgacctgaccgactctgagatggacgtcgtcagattcgacgacgataacagccccagcttcatccagatcagaagcgtggccaagaagcaccccaagacctgggtgcactatatcgccgccgaggaagaggactgggattacgctcctctggtgctggcccctgacgacagaagctacaagagccagtacctgaacaacggccctcagcggatcggccggaagtataagaaagtgcggttcatggcctacaccgacgagacattcaagaccagagaggccatccagcacgagagcggaattctgggccctctgctgtatggcgaagtgggcgatacactgctgatcatcttcaagaaccaggccagcagaccctacaacatctaccctcacggcatcaccgatgtgcggcccctgtattctagaaggctgcccaagggcgtgaagcacctgaaggacttccctatcctgcctggcgagattttcaagtacaagtggaccgtgaccgtggaagatggccccaccaagagcgaccctagatgtctgacacggtactacagcagcttcgtgaacatggaacgcgacctggccagcggcctgattggacctctgctgatctgctacaaagaaagcgtggaccagcggggcaaccagatcatgagcgacaagcggaacgtgatcctgtttagcgtgttcgatgagaaccggtcctggtatctgaccgagaacatccagcggtttctgcccaatcctgccggggtgcaactggaagatcctgagttccaggcaagcaacatcatgcactccatcaatggctatgtgttcgacagcctgcagctgagcgtgtgcctgcacgaagtggcctactggtacatcctgagcattggcgcccagaccgacttcctgtccgtgttctttagcggctacaccttcaagcacaagatggtgtacgaggataccctgacactgttcccattcagcggcgagacagtgttcatgagcatggaaaaccccggcctgtggattctgggctgtcacaacagcgacttccggaacagaggcatgacagccctgctgaaggtgtccagctgcgacaagaacaccggcgactactacgaggacagctatgaggacatcagcgcctacctgctgagcaagaacaatgccatcgagcccagaagcttcagccagaatagcagacacccctccaccagacagaagcagttcaacgccacaacaatccccgagaacgacatcgagaaaaccgatccttggtttgcccacagaacccctatgcctaagatccagaacgtgtcctccagcgatctgctgatgctcctgagacagagccctacacctcacggactgagcctgtccgatctgcaagaggccaaatacgaaaccttcagcgacgacccttctcctggcgccatcgacagcaacaatagcctgagcgagatgacccacttcagaccacagctgcaccacagcggcgacatggtgtttacacctgagagcggcctccagctgagactgaatgagaagctgggaaccaccgccgccaccgagctgaagaaactggacttcaaggtgtcctctaccagcaacaacctgatcagcacaatcccctccgacaacctggctgccggcaccgacaacacatcttctctgggcccacctagcatgcccgtgcactacgatagccagctggataccacactgttcggcaagaagtctagccctctgacagagtctggcggccctctgtctctgagcgaggaaaacaacgacagcaagctgctggaatccggcctgatgaacagccaagagtcctcctggggcaagaatgtgtccagcaccgagtccggcagactgttcaagggaaagagagcccacggacctgctctgctgaccaaggataacgccctgttcaaagtgtccatcagcctgctcaagaccaacaagacctccaacaactccgccaccaacagaaagacccacatcgacggccctagcctgctgatcgagaatagccctagcgtctggcagaatatcctggaaagcgacaccgagttcaagaaagtgacccctctgatccacgaccggatgctcatggacaagaacgccaccgctctgcggctgaaccacatgagcaacaagacaaccagcagcaagaatatggaaatggtgcagcagaagaaagagggccccattcctccagacgctcagaaccccgatatgagcttcttcaagatgctctttctgcccgagagcgcccggtggattcagagaacacacggcaagaactccctgaactccggccagggaccttctccaaagcagctggtttccctgggacctgagaagtccgtggaaggacagaacttcctgagcgaaaagaacaaagtggtcgtcggcaagggcgagttcaccaaggatgtgggcctgaaagagatggtctttcccagcagccggaacctgttcctgaccaacctggacaacctgcacgagaacaacacccacaatcaagagaagaagatccaagaggaaatcgaaaagaaagagacactcatccaagagaacgtggtgctgcctcagatccacacagtgaccggcaccaagaactttatgaagaatctgttcctgctgagtacccggcagaacgtggaaggcagctacgatggcgcttatgcccctgtgctgcaggacttcagatccctgaacgactccaccaatcggacaaagaagcacacagcccacttctccaagaagggcgaagaagagaacctggaaggactgggcaatcagaccaagcagatcgtcgagaagtacgcctgcaccaccagaatcagccccaacacaagccagcagaacttcgtgacccagcggagcaaaagagccctgaagcagtttcggctgcccctggaagaaaccgagctggaaaagcggatcatcgtggacgacaccagcacacagtggtccaagaacatgaagcacttgacccctagcacactgacccagatcgactacaacgagaaagagaagggcgctatcacacagagcccactgagcgactgtctgaccagaagccacagcatccctcaggccaacagatcccctctgccaatcgccaaagtgtctagcttccccagcatcagacccatctacctgaccagagtgctgttccaggacaacagcagccatctgccagccgccagctaccggaagaaagattctggcgtgcaagagagcagccactttctgcagggcgctaagaagaacaatctgagcctggctattctgaccctggaaatgaccggcgatcagagagaagtcggctctctgggcaccagcgccacaaatagcgtgacctacaaaaaggtggaaaacaccgtgctgcctaagcctgacctgccaaagacaagcggcaaggtggaactgctgccaaaggtgcacatctaccagaaggacctgtttcctaccgagacaagcaacggctctcccggccatctggatctggtggaaggatctctgctgcagggaaccgagggcgccatcaagtggaacgaggccaatagacctggcaaggtgcccttcctgagagtggccacagagtccagcgccaagacaccctctaaactgctggaccctctggcctgggacaaccactatggcactcagatccccaaagaggaatggaagtcccaagagaagtcccctgaaaagaccgccttcaagaagaaggacaccattctgtccctgaatgcctgcgagagcaaccacgccattgccgccatcaatgagggccagaacaagcccgagatcgaagtgacctgggccaagcagggaagaaccgagagactgtgtagccagaatcctcctgtgctgaagcggcaccagagagaaatcacccggaccacactgcagagcgaccaagaagagatcgattacgacgataccatcagcgtcgagatgaagaaagaagatttcgacatctacgacgaggacgagaatcagagccctcggagcttccagaagaaaaccaggcactactttattgccgccgtcgagcggctgtgggactacggaatgtctagctctcctcacgtgctgcggaatagagcccagtctggtagcgtgccccagttcaaaaaggtcgtgttccaagagttcaccgacggcagcttcacccagccactgtatagaggcgagctgaacgagcatctgggcctgctgggcccttatatcagagccgaagtggaagataacatcatggtcaccttccggaatcaggctagccggccttacagcttctacagctccctgatctcctacgaagaggaccagagacagggcgcagagccccggaagaatttcgtgaagcccaacgagactaagacctacttttggaaggtgcagcaccatatggcccctacaaaggacgagttcgactgcaaagcctgggcctacttctccgatgtggacctcgaaaaggacgtgcacagcggactcatcggcccactgcttgtgtgccacaccaacacactgaaccccgctcacggcagacaagtgacagtgcaagagttcgccctgtttttcaccatcttcgacgaaacgaagtcctggtacttcaccgaaaacatggaaagaaactgcagggccccttgcaacattcagatggaagatcccaccttcaaagagaactaccggttccacgccatcaacggctacatcatggacacactgcccggcctggttatggcccaggatcagagaatccggtggtatctgctgtccatgggctccaacgagaatatccactccatccacttcagcggccacgtgttcaccgtgcggaaaaaagaagagtacaaaatggccctgtacaatctgtaccctggggtgttcgaaaccgttgagatgctgcctagcaaggccggaatttggagagtggaatgtctgattggagagcacctccacgccgggatgagcaccctgtttctggtgtactccaacaagtgtcagacccctctcggcatggcctctggccacattagagacttccagatcaccgccagcggacagtatggacagtgggcccctaaactggccagactgcactactccggcagcatcaatgcctggtccaccaaagagcctttcagctggatcaaagtggacctgctggctcccatgatcatccacggaatcaagacccagggcgccagacaaaagttcagcagcctgtacatcagccagttcatcatcatgtacagcctggacggaaagaagtggcagacctaccggggcaatagcaccggcacactgatggtgttcttcggcaacgtggactccagcggcattaagcacaacatcttcaaccctccaatcattgcccggtacatccggctgcaccccacacactacagcatcaggtctaccctgagaatggaactgatgggctgcgacctgaacagctgctctatgcccctcggaatggaaagcaaggccatcagcgacgcccagatcacagcctctagctacttcaccaacatgttcgccacttggagcccctctaaggcccggcttcatctgcaaggcagaagcaacgcttggaggccccaagtgaacaaccccaaagaatggctccaggtggactttcagaaaaccatgaaagtgacaggcgtgaccacacagggcgtcaagtccctgctgacctctatgtacgtgaaagagtttctgatcagctccagccaggacggccaccagtggaccctgttcttccagaacggcaaagtgaaagtgttccagggaaatcaggacagcttcacacccgtggtcaatagtctggacccaccactgctgacccgctacctgcgaattcaccctcagtcttgggtgcaccagattgccctgcggatggaagtgctgggctgtgaagctcaggacctctactag

SEQ ID NO: 392 - DNA, 4980 bp, synthetic construct
  misc_feature 1..4980: note = Description of Artificial Sequence: Synthetic polynucleotide
  source 1..4980: mol_type = other DNA
atgcagatcgagctgtctacctgcttcttcctgtgcctgctgcggttctgcttcagcgccaccagaagatattacctgggcgccgtggaactgagctgggactacatgcagtctgacctgggagagctgcccgtggacgctagatttcctccaagagtgcccaagagcttccccttcaacacctccgtggtgtacaagaaaaccctgttcgtggaattcaccgaccacctgttcaatatcgccaagcctcggcctccttggatgggactgctgggacctacaattcaggccgaggtgtacgacaccgtggtcatcaccctgaagaacatggccagccatcctgtgtctctgcacgccgtgggagtgtcttattggaaggcttctgagggcgccgagtacgacgatcagacaagccagagagagaaagaggacgacaaggttttccctggcggcagccacacctatgtctggcaggtcctgaaagaaaacggccctatggcctccgatcctctgtgcctgacatacagctacctgagccacgtggacctggtcaaggacctgaattctggcctgatcggagccctgctcgtgtgtagagaaggcagcctggccaaagagaaaacccagacactgcacaagttcatcctgctgttcgccgtgttcgacgagggcaagagctggcacagcgagacaaagaacagcctgatgcaggacagggatgccgcctctgctagagcttggcctaagatgcacaccgtgaacggctacgtgaacagaagcctgcctggactgatcggctgccacagaaagtccgtgtactggcacgtgatcggcatgggcacaacacctgaggtgcacagcatctttctggaaggccacaccttcctcgtgcggaaccacagacaggccagcctggaaatcagccctatcaccttcctgaccgctcagaccctgctgatggatctgggccagtttctgctgttctgccacatcagctcccaccagcacgatggcatggaagcctacgtgaaggtggacagctgccccgaagaaccccagctgcggatgaagaacaacgaggaagccgaggactacgacgacgacctgaccgactctgagatggacgtcgtcagattcgacgacgataacagccccagcttcatccagatcagaagcgtggccaagaagcaccccaagacctgggtgcactatatcgccgccgaggaagaggactgggattacgctcctctggtgctggcccctgacgacagaagctacaagagccagtacctgaacaacggccctcagcggatcggccggaagtataagaaagtgcggttcatggcctacaccgacgagacattcaagaccagagaggccatccagcacgagagcggaattctgggccctctgctgtatggcgaagtgggcgatacactgctgatcatcttcaagaaccaggccagcagaccctacaacatctaccctcacggcatcaccgatgtgcggcccctgtattctagaaggctgcccaagggcgtgaagcacctgaaggacttccctatcctgcctggcgagattttcaagtacaagtggaccgtgaccgtggaagatggccccaccaagagcgaccctagatgtctgacacggtactacagcagcttcgtgaacatggaacgcgacctggccagcggcctgattggacctctgctgatctgctacaaagaaagcgtggaccagcggggcaaccagatcatgagcgacaagcggaacgtgatcctgtttagcgtgttcgatgagaaccggtcctggtatctgaccgagaacatccagcggtttctgcccaatcctgccggggtgcaactggaagatcctgagttccaggcaagcaacatcatgcactccatcaatggctatgtgttcgacagcctgcagctgagcgtgtgcctgcacgaagtggcctactggtacatcctgagcattggcgcccagaccgacttcctgtccgtgttctttagcggctacaccttcaagcacaagatggtgtacgaggataccctgacactgttcccattcagcggcgagacagtgttcatgagcatggaaaaccccggcctgtggattctgggctgtcacaacagcgacttccggaacagaggcatgacagccctgctgaaggtgtccagctgcgacaagaacaccggcgactactacgaggacagctatgaggacatcagcgcctacctgctgagcaagaacaatgccatcgagcccagaagcttcagccagaatagcagacacccctccaccagacagaagcagttcaacgccacaacaatccccgagaacgacatcgagaaaaccgatccttggtttgcccacagaacccctatgcctaagatccagaacgtgtcctccagcgatctgctgatgctcctgagacagagccctacacctcacggactgagcctgtccgatctgcaagaggccaaatacgaaaccttcagcgacgacccttctcctggcgccatcgacagcaacaatagcctgagcgagatgacccacttcagaccacagctgcaccacagcggcgacatggtgtttacacctgagagcggcctccagctgagactgaatgagaagctgggaaccaccgccgccaccgagctgaagaaactggacttcaaggtgtcctctaccagcaacaacctgatcagcacaatcccctccgacaacctggctgccggcaccgacaacacatcttctctgggcccacctagcatgcccgtgcactacgatagccagctggataccacactgttcggcaagaagtctagccctctgacagagtctggcggccctctgtctctgagcgaggaaaacaacgacagcaagctgcctcctgtgctgaagcggcaccagcgggaaatcaccagaaccacactgcagagcgaccaagaggaaatcgattacgacgacaccatcagcgtcgagatgaagaaagaagatttcgacatctacgacgaggacgagaatcagagccccagatcctttcagaaaaagacccggcactacttcattgccgccgtcgagagactgtgggactacggcatgtctagcagccctcacgtgctgagaaatagagcccagagcggcagcgtgccccagttcaagaaagtggtgttccaagagttcaccgacggcagcttcacccagccactgtatagaggcgagctgaacgagcatctgggcctgctgggcccttatatcagagccgaagtggaagataacatcatggtcaccttccggaatcaggctagccggccttacagcttctacagctccctgatctcctacgaagaggaccagagacagggcgctgagccccggaagaatttcgtgaagcccaacgagactaagacctacttttggaaggtgcagcaccacatggcccctacaaaggacgagttcgactgcaaagcctgggcctacttctccgatgtggatctggaaaaggacgtgcacagcgggctcatcggaccactgcttgtgtgccacaccaacacactgaaccccgctcacggcagacaagtgacagtgcaagagttcgccctgttcttcaccatcttcgacgaaacaaagagctggtacttcaccgagaatatggaacggaactgcagggccccttgcaacatccagatggaagatcccaccttcaaagagaactaccggttccacgccatcaacggctacatcatggacacactgcccggcctggttatggcccaggatcagagaatccggtggtatctgctgtccatgggctccaacgagaatatccacagcatccacttcagcggccacgtgttcaccgtgcggaaaaaagaagagtacaaaatggccctgtacaatctgtaccctggggtgttcgaaaccgtggaaatgctgccttccaaggccggcatttggagagtggaatgtctgattggagagcacctccacgccggaatgagcaccctgtttctggtgtactccaacaagtgtcagacccctctcggcatggcctctggacacatcagagacttccagatcaccgcctctggccagtacggacagtgggctcctaaactggctcggctgcactactccggcagcatcaatgcctggtccaccaaagagcccttcagctggatcaaggtggacctgctggctcccatgatcatccacggaatcaagacccagggcgcaagacagaagttcagcagcctgtacatcagccagttcatcatcatgtacagcctggacggaaagaagtggcagacctaccggggcaatagcaccggcacactcatggtgttcttcggcaacgtggactccagcggcattaagcacaacatcttcaaccctccaatcattgcccggtacatccggctgcaccccacacactacagcatccggtctaccctgagaatggaactgatgggctgcgacctgaacagctgctctatgcccctcggaatggaaagcaaggccatcagcgacgcccagatcacagccagcagctacttcaccaacatgttcgccacttggagcccctccaaggctagactgcatctgcagggcagaagcaacgcttggaggccccaagtgaacaaccccaaagagtggctgcaggttgactttcaaaagaccatgaaagtgaccggcgtgaccacacagggcgtcaagtctctgctgacctctatgtacgtgaaagagttcctgattagcagcagccaggacggccaccagtggaccctgtttttccagaacggcaaagtgaaagtgttccagggcaatcaggacagcttcacacccgtggtcaattctctggaccctccactgctgaccagatacctgcggattcaccctcagtcttgggtgcaccagatcgctctgcggatggaagtgctgggctgtgaagctcaggacctctactag

SEQ ID NO: 393 - DNA, 4374 bp, synthetic construct
  misc_feature 1..4374: note = Description of Artificial Sequence: Synthetic polynucleotide
  source 1..4374: mol_type = other DNA
atgcagatagaattatctacttgtttttttctttgtctgctcaggttctgcttctctgctacaaggaggtattacttaggtgctgtagagttatcttgggactacatgcagtctgatcttggggagctccctgtggatgcaagatttccccctagagtacctaaaagtttccctttcaacacaagtgtggtgtataagaagactctgtttgttgagttcacagatcaccttttcaatattgccaagcccagacccccctggatgggtctactggggccaacaattcaagcagaggtatatgatacagtggtgatcacattaaagaacatggcatcccaccctgtaagcctgcatgctgttggtgtgtcctattggaaagcaagtgaaggtgctgaatatgatgatcaaacatcccaaagagagaaggaagatgacaaagtcttcccaggtggctctcacacctatgtgtggcaagtgctcaaggaaaatgggcctatggctagtgatccattgtgcctcacatatagctacctgtcccatgtggacttagttaaagatctgaactcaggtctgattggtgccctgctggtctgtagggaaggatcactagctaaagaaaaaacccagactttacacaagttcatcttattatttgctgtttttgatgagggaaagagctggcactcagagactaagaattcactcatgcaggatagagatgcagcttctgctagagcatggccaaaaatgcatactgtgaatgggtatgttaacaggagtctgcctggcctcataggctgccatagaaaatcagtgtactggcatgtcataggtatgggcactactcctgaggtgcattccatttttttggaggggcatactttccttgtaagaaaccacaggcaggcttcattggaaattagtccaataacctttctcacagcccagactctgctaatggacttggggcagtttttattattttgtcacattagctctcatcagcatgatggaatggaagcctatgttaaggttgattcctgcccagaagagccccagttgagaatgaagaacaatgaggaagcagaagactatgatgatgatctaacagactcagaaatggatgttgtgagatttgatgatgataactccccaagttttattcagatcaggtcagtggccaagaaacatccaaaaacatgggttcattatattgcagcagaagaagaagactgggattatgcacccttggtattagcccctgatgacagaagctataagtcacaatatctcaacaatggaccccagagaattggcagaaagtacaaaaaagtcaggtttatggcttatactgatgagactttcaaaactagagaggctattcaacatgaatctggcatcctaggtcctttgttatatggggaagtaggggacaccttattaattatatttaaaaaccaggccagtaggccttacaacatttacccccacggtataacagatgtcagaccactgtactcaaggaggctaccaaaaggggtgaagcacctaaaagacttccccatcctacctggtgagattttcaagtataagtggacagtgactgtagaagatggtccaaccaaatcagatcccagatgcctgacaaggtactacagtagctttgtaaatatggagagagacctggcctcagggttaatagggcccctactgatctgctacaaggagagtgtagaccaaagaggcaaccaaattatgtcagacaagagaaatgtcatcctctttagtgtttttgatgagaataggtcctggtacctgacagaaaatatccaaagattccttccaaatccagcaggggtacaactggaggaccctgagttccaggcctccaatatcatgcacagcatcaatggttatgtgtttgacagtttgcaactttcagtgtgccttcatgaggttgcatactggtatatactttctataggggcccagacagacttcttgtcagttttcttttcaggctatactttcaagcataagatggtatatgaagataccctgactctttttccctttagtggtgagacagttttcatgtcaatggaaaacccagggctttggatcttgggatgccacaactctgactttagaaacagaggcatgactgcccttttaaaggtgtcctcttgtgataagaatactggagactactatgaggacagctatgaggacatttcagcctatctgctgtcaaaaaataatgctatagagccaaggtcattttctcaaaatcctcctgtcctgaagaggcaccaaagagagataaccaggactaccttacagtctgaccaggaggaaattgattatgatgacacaataagtgtggagatgaaaaaggaggattttgatatttatgatgaggatgaaaaccaatctccaagatctttccagaagaagactagacactatttcattgctgcagtggaaagactgtgggactatggaatgtcctccagccctcatgttctcaggaatagggctcaaagtggttctgtgccacagttcaagaaggtggtgtttcaggaattcacagatgggtcctttactcaaccactgtataggggagaactcaatgaacatctaggattactaggtccctacattagagctgaggtggaggacaatatcatggtcactttcaggaaccaggcatctagaccatactctttttacagctccttgatatcttatgaagaggaccagagacagggtgcagaacccaggaagaactttgtgaaacccaatgagaccaaaacatacttctggaaggtccagcatcatatggctcctaccaaggatgaatttgactgcaaagcctgggcttacttctcagatgtggatttggagaaagatgtgcacagtggcttgattgggcctcttttggtatgtcataccaacaccttaaaccctgctcatggaagacaagtaacagtgcaagagtttgccctctttttcactatatttgatgagacaaaaagttggtactttactgagaatatggagaggaactgcagggctccctgcaatatacagatggaggatcctactttcaaggaaaactataggtttcatgccattaatggctatatcatggatacattgcctggcttagttatggcccaggatcagagaatcagatggtacctccttagtatgggaagcaatgaaaacatacattctattcacttcagtggacatgtctttactgtgagaaaaaaggaagagtacaagatggcactgtacaatctgtaccctggagtgtttgagacagttgagatgctgcccagcaaggctgggatctggagggtagaatgcctgattggagaacacttacatgcaggtatgtccactctattcttggtctattccaacaagtgtcagacccccctaggcatggcatctggccatattagagatttccagataactgcttctggtcagtatggccagtgggcccccaagcttgctagacttcactacagtggttcaataaatgcctggtccaccaaggagcccttcagctggattaaagtggacttgctagcccccatgatcattcatgggataaaaacacagggtgccagacagaaattttcatctctgtacatcagccagtttatcatcatgtacagtctggatggcaaaaaatggcagacctacagaggtaactctacaggtacactaatggtattttttggcaatgtagattcatcaggtatcaagcataatatctttaatcctcccattattgccagatacatcaggttgcacccaactcattacagtataagatccactttaaggatggagcttatggggtgtgaccttaatagctgcagtatgcccttgggaatggaaagtaaggccatatcagatgcccagattactgcaagcagctactttacaaacatgtttgcaacctggtctcctagtaaagccaggctgcacttgcagggtaggagcaatgcatggagaccccaggtcaataacccaaaagagtggcttcaagttgactttcaaaagacaatgaaggtaacaggggtaaccacccaaggggtaaagagtctgctgacatctatgtatgtaaaagaattcctcatctcaagtagtcaagatgggcaccagtggacactgttcttccagaatggaaaagttaaggtgttccaaggtaatcaagacagcttcactccagtggtgaacagtctggatccaccactcctaaccaggtacctgaggatccaccctcagtcctgggtccaccagatagctctgagaatggaagtgctgggctgtgaagctcaggacctatactga

SEQ ID NO: 394 - DNA, 7056 bp, synthetic construct
  misc_feature 1..7056: note = Description of Artificial Sequence: Synthetic polynucleotide
  source 1..7056: mol_type = other DNA
atgcaaattgaattgagtacctgttttttcctctgtctattaaggttttgtttcagtgcaacaagaaggtattatctgggagctgttgagttatcctgggactacatgcagtctgacctgggagagctcccagtggatgctaggtttcccccaagagtacccaaaagcttccctttcaacacttctgttgtctataaaaagactctgtttgtagaattcacagatcatctgtttaacattgccaagcctagacctccatggatggggctgctgggaccaactattcaggcagaggtttatgacactgtggtgattacacttaagaatatggcatcccacccagtgagcctgcatgctgttggggtttcctactggaaggcaagtgaaggagctgagtatgatgaccagactagccaaagagagaaggaggatgacaaggtctttccaggtggcagccacacctatgtctggcaggtgctgaaggagaatggccctatggcctctgatcctttgtgtctaacctacagttatttgtctcatgtggacctggtgaaggaccttaactcagggctgataggggccttgctggtgtgtagggagggaagcctggctaaggaaaagacacagactctgcataagtttattctcttgtttgcagtgtttgatgagggtaaaagctggcactctgaaacaaaaaacagcttgatgcaggacagggatgctgccagtgctagggcttggcctaagatgcacacagtcaatggctatgttaacagatcactgcctggtttgattggctgccacagaaagtctgtttactggcatgtaattgggatggggacaaccccagaagttcactctatcttcctggaagggcacaccttcctggttagaaatcatagacaggcatccttagagatttctcctattacattcctgactgcccagaccctcctcatggacctgggtcagttcctgcttttttgccacatttcctcccaccagcatgatggcatggaggcctatgtgaaagttgattcttgccctgaggagcctcagcttaggatgaagaacaatgaagaggctgaggactatgatgatgacctaacagacagtgagatggatgttgtgaggtttgatgatgacaattcacctagtttcatccagattaggtctgtggctaagaaacatccaaagacctgggttcactacattgcagcagaggaggaggactgggattatgcccccctggttctggcacctgatgacagaagctataagtcccagtatctcaacaatggcccccagaggattggaagaaaatacaaaaaagtcagatttatggcctatacagatgagacttttaaaactagggaagctattcagcatgagtcagggatcctgggacctcttctttatggagaggtgggggacactcttctgataatttttaaaaatcaggcaagtagaccttataacatctacccccatgggatcactgatgtcaggcctctgtactcaagaaggctgcccaagggtgtcaaacacctcaaggatttccctattcttcctggggagatcttcaaatacaagtggacagttactgtggaggatggccccaccaaatctgacccaaggtgcctcaccagatattacagctcctttgtgaatatggaaagagacctagctagtggtctcattggcccactgctcatctgttacaaggagtcagtggaccagagagggaatcaaattatgtctgacaagagaaatgtgatccttttctcagtgtttgatgagaacagaagctggtatctgacagagaacattcaaaggtttctgccaaacccagctggagttcagctggaggaccctgaattccaggcatctaatattatgcattctatcaatggatatgtgtttgatagtctgcagctgtctgtgtgcctgcatgaagtggcctactggtatatcctctctattggtgcccagacagatttcttgtctgtgtttttcagtggttacacatttaaacataaaatggtgtatgaggacacacttacattattcccttttagtggagagacagtgtttatgtccatggagaatccaggcctgtggatcttggggtgtcataatagtgactttaggaatagaggtatgacagctctgctcaaagtgtcttcctgtgacaagaacacaggggactattatgaggactcttatgaggacatttcagcctatttactgtccaagaacaatgccattgaaccaagatctttctctcagaactcaagacaccccagcaccaggcagaagcagttcaatgcaaccaccatcccagagaatgatattgaaaaaactgacccttggtttgcccacaggactcccatgcctaagattcagaatgtatcttcatcagacttgctgatgctcctgagacagagcccaactcctcatggcctgagcttaagtgacctccaggaggctaagtatgaaactttctcagatgatcccagtcctggtgccattgattctaataattccctgtctgagatgacacacttcagaccccagctccaccactctggagatatggtctttactcctgaatcaggcctgcagctgaggctgaatgaaaagcttggcaccacagcagctactgaactgaaaaagctggattttaaagtgagctccacatccaacaacctgatttccactatcccctcagataacttggcagcagggactgataacacaagctcactgggtcccccttccatgcctgtccattatgatagtcagctggatactactctgtttggtaagaaatcctctcccctgactgaaagtggaggccctctttccctgtcagaggagaacaatgacagcaaactgttagagtctggactcatgaactcacaggaaagttcttggggcaagaatgtgtctagcactgagtctgggagactgtttaagggcaagagggcccatggaccagccctgctgacaaaggataatgcactgtttaaggtctcaatcagcctgttgaagaccaacaaaaccagtaataattctgcaacaaacaggaagacccacattgatggaccctctcttctcattgagaattccccttctgtctggcagaacatcttggaatcagatacagagttcaagaaggtgactcccctgatccatgataggatgctcatggataagaatgccacagcactcaggctcaatcacatgagcaacaagactacctcctccaaaaatatggagatggtgcagcagaagaaggaaggtcccattccccctgatgcacagaatccagatatgagcttctttaagatgctgtttttgcctgagtctgccaggtggattcagaggacacatgggaagaactcacttaactctggccaaggtcccagtcctaagcagttggtgagcttggggcctgagaaaagtgtggagggacagaatttcctgtctgaaaagaacaaagtggttgtgggcaaaggagagttcactaaagatgtgggactgaaggagatggtgtttcctagttcaagaaatctctttcttaccaatcttgataacctgcatgagaacaacacccacaatcaggaaaagaagatccaggaggaaattgagaagaaggaaaccctgatccaggaaaatgttgtgctgccacagatccacactgttactgggaccaaaaatttcatgaaaaacctgtttctcctgtctaccagacagaatgtagagggaagctatgatggggcctatgcccctgttctccaggacttcagatccctgaatgactccaccaacaggactaagaaacatactgcacactttagtaagaagggggaggaggagaacctggagggattgggaaaccagaccaagcagattgtggagaaatatgcttgcaccactagaatctcacctaacacaagccagcagaactttgtgacccagaggtctaagagggccctcaaacagtttagattgcctttggaggagactgagctggaaaagaggattattgtggatgacacctctacccagtggagcaagaatatgaagcacctgaccccaagcacccttactcagattgattacaatgaaaaagaaaagggtgccatcacccagagccccttgagtgactgtttgacaaggtcccacagtatcccacaggctaacagatctcctctgcctattgccaaggtcagctccttcccttccatcagacccatctatctgaccagagtgctgttccaggacaactcctctcatctgccagctgcctcctataggaagaaggatagtggtgtgcaggaatcatctcactttctgcagggagccaagaagaacaatctgagcctggcaattctcacacttgagatgacaggagaccagagggaagtgggaagtctgggcacttctgctaccaattctgtcacctacaagaaagtggagaatacagttctgcccaagccagacctgcctaaaacatctggaaaggttgagctgctgcctaaggtgcacatataccagaaggacctattccctacagagacatccaatggctccccaggccacctggacttggtagaggggtctctcctgcagggcactgaaggtgctatcaagtggaatgaggctaatagacctgggaaggtgccatttctgagggtggccacagagagctcagctaagacacccagcaagctgcttgatcccctggcctgggacaatcactatggaacccagattcctaaggaggagtggaagtcccaggagaagtccccagagaagactgctttcaagaagaaggacactatcctctccctgaatgcctgtgagtctaaccatgctattgctgccatcaatgaaggccagaacaagcctgaaattgaggtgacatgggccaagcagggcagaacagagaggctgtgcagccagaacccacctgtgctcaagaggcaccagagagagatcactagaaccactctgcagtcagaccaggaagagattgactatgatgacaccatctcagttgagatgaaaaaggaggattttgatatttatgatgaggatgagaatcaatccccaagatcttttcagaagaagacaagacattacttcattgctgcagtggagagactgtgggattatggcatgtcctcctcacctcatgtgctgagaaatagagcccagtctggctctgtgccccagttcaaaaaagtggtgtttcaggagttcacagatggttccttcacacagcccctgtacaggggtgagctgaatgagcacctggggttgctgggcccctacatcagagctgaagttgaggataatattatggtgaccttcaggaatcaggccagtaggccttactctttctactccagcctgatctcatatgaggaggaccagagacagggggctgaacctaggaagaattttgtgaagcccaatgaaacaaagacatacttctggaaggtgcagcaccacatggctcctaccaaggatgaatttgattgcaaggcttgggcctatttttctgatgtggacctggagaaggatgtgcattctggcctcattggccctctcttggtgtgtcacaccaataccttgaatccagcccatggcagacaggtgactgttcaggagtttgctctgtttttcaccatctttgatgagacaaagtcctggtattttacagagaatatggagaggaattgcagggccccctgcaacatccagatggaagacccaaccttcaaggagaactacagattccatgcaatcaatggatatatcatggacaccctgcctggcctggttatggctcaggatcagagaatcaggtggtatctgctgtctatggggtcaaatgagaacatccatagtatccacttctctggccatgtgtttacagtgagaaagaaggaagaatataagatggccctgtacaacctctaccctggagtgtttgaaactgttgaaatgctgccttcaaaggctggaatctggagggtggaatgcctgattggagagcaccttcatgctggcatgtccaccctgtttctggtgtacagcaataagtgtcagactcctctgggtatggcttcaggccacatcagggacttccagatcactgcctcaggacagtatggacagtgggctcccaaactggcaaggctccactactcaggcagcattaatgcctggtccaccaaagagcctttcagctggattaaggtggatctcctggcacctatgatcatccatgggatcaagactcagggagctaggcagaagtttagcagcctgtacatttctcagtttatcattatgtacagcctggatggaaaaaagtggcagacctatagaggaaactccactggaacactgatggtgttttttggcaatgtggactcaagtgggatcaagcacaatatcttcaacccccctatcattgccagatacatcaggctccaccctacacactactctatcagatctacacttaggatggagctgatgggatgtgatctgaactcttgcagtatgcctctgggtatggagtccaaggccatctctgatgctcagatcacagccagctcttactttactaatatgtttgctacctggtccccaagcaaggcaagactgcacctgcagggcagatccaatgcttggagaccccaggtgaataacccaaaagagtggcttcaggtggacttccagaagactatgaaggtgactggagtgaccacccagggggtgaagtcactgctgacctccatgtatgtgaaggagttcctgatctccagctcccaggatggccaccagtggaccctgttcttccagaatggaaaggtgaaggtgttccagggaaaccaggactcctttacccctgtggtgaactccctggaccccccactgctgaccagatacctgagaatccatccccagagctgggtgcaccagattgcccttaggatggaggtgctgggatgtgaagcccaggacctgtactaa

SEQ ID NO: 395 - DNA, 5013 bp, synthetic construct
  misc_feature 1..5013: note = Description of Artificial Sequence: Synthetic polynucleotide
  source 1..5013: mol_type = other DNA
atgcaaattgagttaagtacctgttttttcctgtgcctgttgagattttgcttctctgctaccagaaggtattacctgggagctgtggagctgtcatgggactacatgcagtctgacctgggagagctccctgttgatgctaggtttccccctagggtgccaaagtcctttccttttaacacctcagtggtgtacaagaagacactgtttgtggagtttactgaccacctcttcaatattgctaagccaagacccccttggatgggtctcttgggccctaccatccaggctgaggtttatgatacagtggtgattaccctcaagaatatggcttctcatcctgttagtctgcatgcagtaggggtcagctattggaaggccagtgaaggagctgagtatgatgaccagaccagccagagagagaaagaggatgacaaggtgttccctgggggatcacacacctatgtgtggcaggtgttgaaggaaaatggacccatggcctctgacccactctgcctgacttactcctacctgtctcatgtggacctggtcaaagatctgaactctggcctgattggggcactgttggtgtgcagagaagggtctcttgccaaggagaagactcagaccctgcacaagttcatcctgctgtttgctgtgtttgatgaaggcaagtcttggcattctgagactaagaacagcctgatgcaagatagagatgctgcatctgccagggcctggcctaagatgcacactgtgaatggatatgtgaataggtccttgcctggcctgattggatgccataggaagtctgtgtactggcatgtgattggcatgggcaccacccctgaggttcactctatttttctggagggccatactttccttgtgaggaatcatagacaggcctctctggagattagccctattacatttctgactgctcagaccctcctcatggacttggggcagtttctgttattctgccacatcagcagccatcaacatgatggtatggaagcctatgtcaaagtggatagctgccctgaagaaccacagcttaggatgaagaacaatgaggaggcagaggactatgatgatgatctgactgattctgaaatggatgtggtgagatttgatgatgataatagcccttcctttatccagatcaggtcagtggccaagaagcacccaaagacctgggtgcattatattgctgctgaggaggaggactgggactatgcccctctggtgctggcccctgatgatagaagctataagtctcaatacttgaataatggcccacagaggattgggagaaagtacaaaaaggtgagatttatggcctacactgatgagactttcaagaccagagaggccatccagcatgaatcaggcattttgggtcccctgctgtatggagaggtgggggataccctgctgatcatctttaagaaccaggccagcagaccttacaacatttaccctcatgggatcacagatgtgaggccactctactctaggagattgcccaagggagtcaagcatcttaaggactttccaatcctgcctggggagatcttcaagtacaaatggacagtgacagttgaggatggacctactaagagtgaccccaggtgtctgaccagatattactctagctttgtcaatatggaaagagacctggcttcaggcttgataggccctcttctcatctgctacaaagagtctgtggaccagagaggaaatcagattatgtctgacaagagaaatgttattctgttttcagtctttgatgagaacagaagttggtacttgacagagaacattcagagatttctgcctaaccctgcaggagtgcagcttgaggaccctgagtttcaggcttccaatatcatgcattctatcaatggctatgtgtttgatagcctgcagctgtctgtgtgcctgcatgaggttgcctattggtacatcctgtctattggggcccaaactgatttcttgtctgtgtttttcagtggatatacctttaagcataagatggtgtatgaagataccttgacacttttccctttctcaggagagactgtcttcatgtctatggagaaccctggactgtggatcctgggatgccacaactcagacttcagaaacaggggtatgacagctctgcttaaggtctcctcatgtgacaaaaatacaggagactactatgaagattcctatgaggacatctctgcttacctgctcagcaaaaacaatgccattgagcccagaagcttcagccagaattccagacatcccagtactaggcagaagcagtttaatgccaccaccatcccagaaaatgacattgagaagacagacccttggtttgcccatagaaccccaatgcccaagattcagaatgtgagcagctcagacttgctgatgctgctgaggcagtctcctactccccatggcctgtccctctcagatctgcaggaagccaagtatgagacattttctgatgacccctccccaggggctattgacagtaacaacagcctgtctgaaatgacccacttcagacctcagctccaccacagtggggatatggtgtttaccccagagtcaggcctgcagctgagactgaatgagaagctgggaaccacagctgccacagaactgaagaagctggatttcaaggtgagctctacttcaaataatctgatttccactatcccatctgacaatttggcagctggcactgacaatacaagctctctgggcccacctagcatgccagtgcattatgacagccagttggacaccactctttttggaaagaaatccagtcccctgacagagtcaggaggacccctttctctgtctgaggagaacaatgatagtaagcttctggagtcaggcttgatgaactcccaggagagttcttggggcaagaatgtgagctctagggagatcaccagaaccactctgcagtctgaccaagaagagattgattatgatgacactatctctgttgagatgaagaaggaggactttgatatctatgatgaggatgagaaccagtctccaagaagtttccagaagaagaccaggcactactttattgctgctgtggagagactgtgggactatggaatgtcctcctcccctcatgtcctgagaaatagagctcagtcaggatcagtgccccagttcaagaaggtggtgttccaggaattcacagatggaagttttacccagccactgtatagaggtgaactgaatgaacatctgggtctgctggggccctatatcagggctgaggtggaggacaatattatggtgacctttagaaaccaggcctcaaggccctacagcttctactcttccctcatttcatatgaggaagaccagagacagggagcagagcctagaaagaactttgtcaagcccaatgaaaccaaaacctatttctggaaggtgcagcaccacatggcacccaccaaagatgagtttgactgcaaagcctgggcctatttctcagatgtggatctggagaaggatgtccattcaggtctgattggaccactcctggtgtgccacaccaacacactgaatccagctcatggcagacaggtgacagtccaggagtttgccctgtttttcactatttttgatgagaccaagagctggtattttacagagaatatggaaagaaactgcagagccccttgtaatatccagatggaggacccaacctttaaggagaactacaggttccatgccatcaatggctacattatggataccctgcctggcctggttatggcccaggatcagaggatcaggtggtatctgctgtcaatgggctccaatgagaacattcatagtattcacttttcaggacatgtgttcacagtgagaaagaaggaggagtataagatggccctctataatctctacccaggggtgtttgagacagttgagatgctgccatctaaggcaggcatctggagagtggaatgcctcattggagagcacctgcatgctggcatgtccaccctgtttctggtgtactccaacaaatgtcagacccctcttggtatggcctctggccacattagggatttccagattactgccagtggtcagtatgggcagtgggcccctaagctggccagactgcactattctgggagcatcaatgcctggtccaccaaggaacctttttcttggattaaagtggatctgctggccccaatgatcatccatgggatcaagacccagggagctaggcagaagttcagcagcctgtacattagtcagttcatcattatgtacagtctggatggcaaaaagtggcagacatacaggggcaattccactggaaccctgatggtgttctttggaaatgtggatagcagtggtatcaagcacaacattttcaaccctcccatcattgccaggtacatcagactgcatccaacccactacagcattaggagcacccttaggatggagctcatggggtgtgacctgaactcttgctctatgccacttggaatggagagcaaggccatctctgatgcccagattactgctagttcctacttcaccaatatgtttgccacctggtcacccagcaaggccaggctgcacctgcagggaaggtccaatgcttggaggcctcaggtgaacaatccaaaggagtggctgcaggtggacttccagaagactatgaaggtgacaggagtgaccactcagggagtgaagagcctgctgacctccatgtatgtgaaggagtttctgatctccagctcccaggatggccaccagtggaccctgttctttcagaatggcaaggtgaaggtgtttcaggggaatcaggactccttcaccccagtggtgaattccctggatccccctctgctgaccagatacctgagaatccacccccagtcttgggtgcaccagattgcccttaggatggaggtgctgggctgtgaggcccaggacctgtactga

SEQ ID NO: 396 - DNA, 5013 bp, synthetic construct
  misc_feature 1..5013: note = Description of Artificial Sequence: Synthetic polynucleotide
  source 1..5013: mol_type = other DNA
atgcaaattgagttaagtacctgttttttcctgtgcctgttgagattttgcttctctgctaccagaaggtattacctgggagctgtggagctgtcatgggactacatgcagtctgacctgggagagctccctgttgatgctaggtttccccctagggtgccaaagtcctttccttttaacacctcagtggtgtacaagaagacactgtttgtggagtttactgaccacctcttcaatattgctaagccaagacccccttggatgggtctcttgggccctaccatccaggctgaggtttatgatacagtggtgattaccctcaagaatatggcttctcatcctgttagtctgcatgcagtaggggtcagctattggaaggccagtgaaggagctgagtatgatgaccagaccagccagagagagaaagaggatgacaaggtgttccctgggggatcacacacctatgtgtggcaggtgttgaaggaaaatggacccatggcctctgacccactctgcctgacttactcctacctgtctcatgtggacctggtcaaagatctgaactctggcctgattggggcactgttggtgtgcagagaagggtctcttgccaaggagaagactcagaccctgcacaagttcatcctgctgtttgctgtgtttgatgaaggcaagtcttggcattctgagactaagaacagcctgatgcaagatagagatgctgcatctgccagggcctggcctaagatgcacactgtgaatggatatgtgaataggtccttgcctggcctgattggatgccataggaagtctgtgtactggcatgtgattggcatgggcaccacccctgaggttcactctatttttctggagggccatactttccttgtgaggaatcatagacaggcctctctggagattagccctattacatttctgactgctcagaccctcctcatggacttggggcagtttctgttaagctgccacatcagcagccatcaacatgatggtatggaagcctatgtcaaagtggatagctgccctgaagaaccacagcttaggatgaagaacaatgaggaggcagaggactatgatgatgatctgactgattctgaaatggatgtggtgagatttgatgatgataatagcccttcctttatccagatcaggtcagtggccaagaagcacccaaagacctgggtgcattatattgctgctgaggaggaggactgggactatgcccctctggtgctggcccctgatgatagaagctataagtctcaatacttgaataatggcccacagaggattgggagaaagtacaaaaaggtgagatttatggcctacactgatgagactttcaagaccagagaggccatccagcatgaatcaggcattttgggtcccctgctgtatggagaggtgggggataccctgctgatcatctttaagaaccaggccagcagaccttacaacatttaccctcatgggatcacagatgtgaggccactctactctaggagattgcccaagggagtcaagcatcttaaggactttccaatcctgcctggggagatcttcaagtacaaatggacagtgacagttgaggatggacctactaagagtgaccccaggtgtctgaccagatattactctagctttgtcaatatggaaagagacctggcttcaggcttgataggccctcttctcatctgctacaaagagtctgtggaccagagaggaaatcagattatgtctgacaagagaaatgttattctgttttcagtctttgatgagaacagaagttggtacttgacagagaacattcagagatttctgcctaaccctgcaggagtgcagcttgaggaccctgagtttcaggcttccaatatcatgcattctatcaatggctatgtgtttgatagcctgcagctgtctgtgtgcctgcatgaggttgcctattggtacatcctgtctattggggcccaaactgatttcttgtctgtgtttttcagtggatatacctttaagcataagatggtgtatgaagataccttgacacttttccctttctcaggagagactgtcttcatgtctatggagaaccctggactgtggatcctgggatgccacaactcagacttcagaaacaggggtatgacagctctgcttaaggtctcctcatgtgacaaaaatacaggagactactatgaagattcctatgaggacatctctgcttacctgctcagcaaaaacaatgccattgagcccagaagcttcagccagaattccagacatcccagtactaggcagaagcagtttaatgccaccaccatcccagaaaatgacattgagaagacagacccttggtttgcccatagaaccccaatgcccaagattcagaatgtgagcagctcagacttgctgatgctgctgaggcagtctcctactccccatggcctgtccctctcagatctgcaggaagccaagtatgagacattttctgatgacccctccccaggggctattgacagtaacaacagcctgtctgaaatgacccacttcagacctcagctccaccacagtggggatatggtgtttaccccagagtcaggcctgcagctgagactgaatgagaagctgggaaccacagctgccacagaactgaagaagctggatttcaaggtgagctctacttcaaataatctgatttccactatcccatctgacaatttggcagctggcactgacaatacaagctctctgggcccacctagcatgccagtgcattatgacagccagttggacaccactctttttggaaagaaatccagtcccctgacagagtcaggaggacccctttctctgtctgaggagaacaatgatagtaagcttctggagtcaggcttgatgaactcccaggagagttcttggggcaagaatgtgagctctagggagatcaccagaaccactctgcagtctgaccaagaagagattgattatgatgacactatctctgttgagatgaagaaggaggactttgatatctatgatgaggatgagaaccagtctccaagaagtttccagaagaagaccaggcactactttattgctgctgtggagagactgtgggactatggaatgtcctcctcccctcatgtcctgagaaatagagctcagtcaggatcagtgccccagttcaagaaggtggtgttccaggaattcacagatggaagttttacccagccactgtatagaggtgaactgaatgaacatctgggtctgctggggccctatatcagggctgaggtggaggacaatattatggtgacctttagaaaccaggcctcaaggccctacagcttctactcttccctcatttcatatgaggaagaccagagacagggagcagagcctagaaagaactttgtcaagcccaatgaaaccaaaacctatttctggaaggtgcagcaccacatggcacccaccaaagatgagtttgactgcaaagcctgggcctatttctcagatgtggatctggagaaggatgtccattcaggtctgattggaccactcctggtgtgccacaccaacacactgaatccagctcatggcagacaggtgacagtccaggagtttgccctgtttttcactatttttgatgagaccaagagctggtattttacagagaatatggaaagaaactgcagagccccttgtaatatccagatggaggacccaacctttaaggagaactacaggttccatgccatcaatggctacattatggataccctgcctggcctggttatggcccaggatcagaggatcaggtggtatctgctgtcaatgggctccaatgagaacattcatagtattcacttttcaggacatgtgttcacagtgagaaagaaggaggagtataagatggccctctataatctctacccaggggtgtttgagacagttgagatgctgccatctaaggcaggcatctggagagtggaatgcctcattggagagcacctgcatgctggcatgtccaccctgtttctggtgtactccaacaaatgtcagacccctcttggtatggcctctggccacattagggatttccagattactgccagtggtcagtatgggcagtgggcccctaagctggccagactgcactattctgggagcatcaatgcctggtccaccaaggaacctttttcttggattaaagtggatctgctggccccaatgatcatccatgggatcaagacccagggagctaggcagaagttcagcagcctgtacattagtcagttcatcattatgtacagtctggatggcaaaaagtggcagacatacaggggcaattccactggaaccctgatggtgttctttggaaatgtggatagcagtggtatcaagcacaacattttcaaccctcccatcattgccaggtacatcagactgcatccaacccactacagcattaggagcacccttaggatggagctcatggggtgtgacctgaactcttgctctatgccacttggaatggagagcaaggccatctctgatgcccagattactgctagttcctacttcaccaatatgtttgccacctggtcacccagcaaggccaggctgcacctgcagggaaggtccaatgcttggaggcctcaggtgaacaatccaaaggagtggctgcaggtggacttccagaagactatgaaggtgacaggagtgaccactcagggagtgaagagcctgctgacctccatgtatgtgaaggagtttctgatctccagctcccaggatggccaccagtggaccctgttctttcagaatggcaaggtgaaggtgtttcaggggaatcaggactccttcaccccagtggtgaattccctggatccccctctgctgaccagatacctgagaatccacccccagtcttgggtgcaccagattgcccttaggatggaggtgctgggctgtgaggcccaggacctgtactga

SEQ ID NO: 397 - protein, 1670 aa, synthetic construct
  REGION 1..1670: note = Description of Artificial Sequence: Synthetic polypeptide
MQIELSTCFFLCLLRFCFSATRRYYLGAVELSWDYMQSDLGELPVDARFPPRVPKSFPFNTSVVYKKTLFVEFTDHLFNIAKPRPPWMGLLGPTIQAEVYDTVVITLKNMASHPVSLHAVGVSYWKASEGAEYDDQTSQREKEDDKVFPGGSHTYVWQVLKENGPMASDPLCLTYSYLSHVDLVKDLNSGLIGALLVCREGSLAKEKTQTLHKFILLFAVFDEGKSWHSETKNSLMQDRDAASARAWPKMHTVNGYVNRSLPGLIGCHRKSVYWHVIGMGTTPEVHSIFLEGHTFLVRNHRQASLEISPITFLTAQTLLMDLGQFLLSCHISSHQHDGMEAYVKVDSCPEEPQLRMKNNEEAEDYDDDLTDSEMDVVRFDDDNSPSFIQIRSVAKKHPKTWVHYIAAEEEDWDYAPLVLAPDDRSYKSQYLNNGPQRIGRKYKKVRFMAYTDETFKTREAIQHESGILGPLLYGEVGDTLLIIFKNQASRPYNIYPHGITDVRPLYSRRLPKGVKHLKDFPILPGEIFKYKWTVTVEDGPTKSDPRCLTRYYSSFVNMERDLASGLIGPLLICYKESVDQRGNQIMSDKRNVILFSVFDENRSWYLTENIQRFLPNPAGVQLEDPEFQASNIMHSINGYVFDSLQLSVCLHEVAYWYILSIGAQTDFLSVFFSGYTFKHKMVYEDTLTLFPFSGETVFMSMENPGLWILGCHNSDFRNRGMTALLKVSSCDKNTGDYYEDSYEDISAYLLSKNNAIEPRSFSQNSRHPSTRQKQFNATTIPENDIEKTDPWFAHRTPMPKIQNVSSSDLLMLLRQSPTPHGLSLSDLQEAKYETFSDDPSPGAIDSNNSLSEMTHFRPQLHHSGDMVFTPESGLQLRLNEKLGTTAATELKKLDFKVSSTSNNLISTIPSDNLAAGTDNTSSLGPPSMPVHYDSQLDTTLFGKKSSPLTESGGPLSLSEENNDSKLLESGLMNSQESSWGKNVSSREITRTTLQSDQEEIDYDDTISVEMKKEDFDIYDEDENQSPRSFQKKTRHYFIAAVERLWDYGMSSSPHVLRNRAQSGSVPQFKKVVFQEFTDGSFTQPLYRGELNEHLGLLGPYIRAEVEDNIMVTFRNQASRPYSFYSSLISYEEDQRQGAEPRKNFVKPNETKTYFWKVQHHMAPTKDEFDCKAWAYFSDVDLEKDVHSGLIGPLLVCHTNTLNPAHGRQVTVQEFALFFTIFDETKSWYFTENMERNCRAPCNIQMEDPTFKENYRFHAINGYIMDTLPGLVMAQDQRIRWYLLSMGSNENIHSIHFSGHVFTVRKKEEYKMALYNLYPGVFETVEMLPSKAGIWRVECLIGEHLHAGMSTLFLVYSNKCQTPLGMASGHIRDFQITASGQYGQWAPKLARLHYSGSINAWSTKEPFSWIKVDLLAPMIIHGIKTQGARQKFSSLYISQFIIMYSLDGKKWQTYRGNSTGTLMVFFGNVDSSGIKHNIFNPPIIARYIRLHPTHYSIRSTLRMELMGCDLNSCSMPLGMESKAISDAQITASSYFTNMFATWSPSKARLHLQGRSNAWRPQVNNPKEWLQVDFQKTMKVTGVTTQGVKSLLTSMYVKEFLISSSQDGHQWTLFFQNGKVKVFQGNQDSFTPVVNSLDPPLLTRYLRIHPQSWVHQIALRMEVLGCEAQDLY

SEQ ID NO: 398 - protein, 31 aa, synthetic construct
  REGION 1..31: note = Description of Artificial Sequence: Synthetic polypeptide
SFSQNATNVSNNSNTSNDSNVSPPVLKRHQR

1-54. (canceled)

55. A nucleotide sequence encoding a Factor VIII (FVIII) protein, wherein the nucleotide sequence comprises a sequence having at least 90% identity to a sequence selected from the group consisting of: SEQ ID NO:395, SEQ ID NO:391, SEQ ID NO:392, SEQ ID NO:393, SEQ ID NO:394, SEQ ID NO: 396, and SEQ ID NO:388.

56. The nucleotide sequence of claim 55, wherein the nucleotide sequence comprises a sequence having at least 95% identity to a sequence selected from the group consisting of: SEQ ID NO:395, SEQ ID NO:391, SEQ ID NO:392, SEQ ID NO:393, SEQ ID NO:394, SEQ ID NO: 396, and SEQ ID NO:388.

57. The nucleotide sequence of claim 55, wherein the nucleotide sequence comprises a sequence having at least 96% identity to a sequence selected from the group consisting of: SEQ ID NO:395, SEQ ID NO:391, SEQ ID NO:392, SEQ ID NO:393, SEQ ID NO:394, SEQ ID NO: 396, and SEQ ID NO:388.

58. The nucleotide sequence of claim 55, wherein the nucleotide sequence comprises a sequence having at least 97%, 98%, or 99% identity to a sequence selected from the group consisting of: SEQ ID NO:395, SEQ ID NO:391, SEQ ID NO:392, SEQ ID NO:393, SEQ ID NO:394, SEQ ID NO: 396, and SEQ ID NO:388.

59. The nucleotide sequence of claim 55, wherein the nucleotide sequence comprises a sequence selected from the group consisting of: SEQ ID NO:395, SEQ ID NO:391, SEQ ID NO:392, SEQ ID NO:393, SEQ ID NO:394, SEQ ID NO: 396, and SEQ ID NO:388.

60. The nucleotide sequence of claim 55, wherein the nucleotide sequence consists of a sequence selected from the group consisting of: SEQ ID NO:395, SEQ ID NO:391, SEQ ID NO:392, SEQ ID NO:393, SEQ ID NO:394, SEQ ID NO: 396, and SEQ ID NO:388.

61. A DNA vector comprising the nucleotide sequence of claim 55.

62. A method of expressing an FVIII protein in a cell comprising contacting the cell with the nucleotide sequence of claim 55.

63. The method of claim 62, wherein the cell is a liver cell.

64. The method of claim 62, wherein the cell is in vitro or in vivo.

65. The method of claim 62, wherein the at least one nucleotide sequence is codon optimized for expression in a eukaryotic cell.

66. A method of treating a subject with hemophilia A, comprising administering to the subject the nucleotide sequence of claim 62.

67. The method of claim 66, wherein levels of FVIII in the serum of the subject are increased in subjects administered the nucleotide sequence compared to a control.

68. The method of claim 66, wherein the nucleotide sequence is administered to a liver cell.

69. A pharmaceutical composition comprising the nucleotide sequence of claim 55.

70. A cell containing the nucleotide sequence of claim 55.

71. The cell of claim 70, wherein the cell is a liver cell.

72. A composition comprising the nucleotide sequence of claim 55 and a lipid.

73. The composition of claim 72, wherein the lipid is a lipid nanoparticle (LNP).

74. A kit comprising the nucleotide sequence of claim 55.
